(19) United States
(12) Patent Application Publication
(10) Pub. No.: US 2014/0086976 A1
(43) Pub. Date: Mar. 27, 2014

(54) Compositions containing protein polymers and vaccinia virus, and methods of use thereof

(71) Applicants: Aladar A. Szalay, Highland, CA (US); Nanhai George Chen, San Diego, CA (US)

(72) Inventors: Aladar A. Szalay, Highland, CA (US); Nanhai George Chen, San Diego, CA (US)

(21) Appl. No.: 13/987,688

(22) Filed: Aug. 20, 2013

Related U.S. Application Data
(60) Provisional application No. 61/742,895, filed on Aug. 20, 2012.

(51) Int. Cl. A61K 47/42; A61K 35/76

(52) U.S. Cl. CPC A61K 47/42; A61K 35/76
USPC 424/445; 424/93.6; 424/93.2; 424/277.1; 424/174.1; 424/447

(57) ABSTRACT

Provided herein are compositions containing a vaccinia virus and a protein polymer, and articles of manufacture thereof. Also provided are diagnostic and therapeutic methods using the compositions or articles of manufacture.

### RELATED APPLICATIONS

[0001] Benefit of priority is claimed to U.S. Provisional Application No. 61/742,895, filed Aug. 20, 2012, entitled “Compositions Containing Protein Polymers and Vaccinia Virus, and Methods of Use Thereof.”

[0002] This application is related to International PCT Application Serial No. (Attorney Docket No. 33316.04842.WO02/4842PC), filed the same day herewith, entitled “Compositions Containing Protein Polymers and Vaccinia Virus, and Methods of Use Thereof,” which claims priority to U.S. Provisional Application No. 61/742,895.

[0003] The subject matter of each of the above-noted related applications is incorporated by reference in its entirety.

### INCORPORATION BY REFERENCE OF SEQUENCE LISTING PROVIDED ON COMPACT DISCS

[0004] An electronic version on compact disc (CD-R) of the Sequence Listing is filed herewith in duplicate (labeled Copy #1 and Copy #2), the contents of which are incorporated by reference in their entirety. The computer-readable file on each of the aforementioned compact discs, created on Aug. 20, 2013, is identical, 4.24 megabytes in size, and titled 4842SEQ.001.txt.

### FIELD OF THE INVENTION

[0005] Provided herein are compositions containing a vaccinia virus and a protein polymer, and articles of manufacture thereof. Also provided are diagnostic and therapeutic methods using the compositions or articles of manufacture.

### BACKGROUND

[0006] Vaccinia is an oncolytic virus and accumulates in wounds and tumors. Oncolytic viral therapy is effected by administering a virus that accumulates in tumor cells and replicates in the tumor cells. By virtue of replication in the cells, and optional delivery of therapeutic agents, tumor cells are lysed, and the tumor shrinks and can be eliminated. Vaccinia viruses are typically administered systemically or locally. There still exists a need for improved or alternative methods of administering vaccinia viruses for various therapeutic and diagnostic applications. Accordingly, it is among the objects herein, to provide virus compositions that can be employed for diagnostic and/or therapeutic methods.

### SUMMARY

[0007] Provided herein are vaccinia virus in protein polymer compositions. For example, provided herein are vaccinia virus in silk-elastin like protein polymer compositions containing a vaccinia virus and a silk-elastin like protein polymer (SELP). In such examples, the SELP can contain alternating blocks of at least two units each of a silk-like amino acid sequence and an elastin-like amino acid sequence set forth by the formula {[S]ₘ[E]ₙ}_{O}, wherein: S is the silk-like amino acid sequence; m is the number of silk-like amino acid units; E is the elastin-like amino acid sequence; n is the number of elastin-like amino acid units; and o is the number of monomer repeats. In examples of the compositions, m is 2 to 16, 2 to 10, 2 to 8, 4 to 16, 4 to 10 or 4 to 8. In examples of the compositions, n is 1 to 40, 1 to 16, 2 to 12 or 4 to 8. In examples of the compositions o is 2 to 100, 4 to 50, 6 to 25 or 2 to 20. In particular examples, the choice of repeating units and polymer length is such that the SELP has a molecular weight of at least 15 kD. For example, the SELP has a molecular weight of 15 kD to 100 kD, 40 kD to 90 kD or 60 kD to 85 kD.

[0008] The compositions provided herein can be liquid or non-liquid. For example, the compositions are hydrogels. In examples where the composition is a liquid, it is typically a composition that is a precursor hydrogel composition, and that will form a non-liquid or hydrogel form upon time or incubation at physiologic temperature (e.g. about or approximately 37° C.). For example, in examples herein, the SELP is selected from among SELPs that transition from a liquid to a non-liquid form in from about 30 seconds to about 500 minutes at 22° C. to 25° C. In other examples, the SELP is selected from among SELPs that transition from a liquid formulation to a hydrogel at or about 37° C. Any of the compositions herein can further contain an agent that inhibits or decreases hydrogen bonding. For example, the further agent can be urea, guanidine hydrochloride, dimethyl formamide, colloidal gold sol, aqueous lithium bromide or formic acid.

[0009] In examples of the compositions provided herein, the alternating units of silk-like amino acid sequences is GAGAGS (SEQ ID NO:26) or SGAGAG (SEQ ID NO:27), or is a variant thereof that is capable of effecting formation of hydrogen bonds; and/or the elastin-like amino acid sequence is VPGG (SEQ ID NO:30), APGVGV (SEQ ID NO:31), VPGVG (SEQ ID NO:32), or GVGVP (SEQ ID NO:29), or is a variant thereof that confers aqueous solublility. In one example, the elastin-like sequence is a variant sequence having an amino acid sequence GXGVP (SEQ ID NO:35) or VPGXG (SEQ ID NO:36), whereby X is defined as set forth in the sequence listing. For example, the elastin-like sequence is VPGKG (SEQ ID NO:37) or GKGVP (SEQ ID NO:38). In other examples, the sequence is a variant that contains a conservative substitution of any of SEQ ID NOS: 26, 27, 29-32, or 37-38. The conservative substitution is replacement of serine with threonine or replacement of glycine with alanine.

[0010] In examples of the compositions provided herein, the SELP contains a sequence of amino acids having a structural formula and amino acid sequence that is [(VPGVG)₈(GAGAGS)₂]₁₈ (SEQ ID NO:39); [(GVGVP)₄(GAGAGS)₉]₁₃ (SEQ ID NO:40); [(VPGVG)₈(GAGAGS)₄]₁₂ (SEQ ID NO:41); [(VPGVG)₈(GAGAGS)₆]₁₂ (SEQ ID NO:42); [(VPGVG)₈(GAGAGS)₈]₁₁ (SEQ ID NO:43); [(VPGVG)₁₂(GAGAGS)₈]₈ (SEQ ID NO:44); [(VPGVG)₁₆(GAGAGS)₈]₇ (SEQ ID NO:45); [(VPGVG)₃₂(GAGAGS)₈]₅ (SEQ ID NO:46); (GAGAGS)₁₂ GAAVTGRGDSPASAAGY (GAGAGS)₅(GVGVGP)₈]₆ (SEQ ID NO:47); [(GAGAGS)₂ (GVGVP)₄ GKGVP (GVGVP)₃]₆ (SEQ ID NO:48); [(GAGAGS)₂(GVGVP)₄ GKGVP (GVGVP)₃]₁₂ (SEQ ID NO:49); [(GAGAGS)₂(GVGVP)₄ GKGVP (GVGVP)₃]₁₈ (SEQ ID NO:50); [(GAGAGS)₂ (GVGVP)₄ GKGVP (GVGVP)₃]₁₇ GAGAGS)₂ (SEQ ID NO:51); [(GAGAGS)₂-(GVGVP)₄-(GKGVP)-(GVGVP)₃-(GAGAGS)₂]₁₃ (SEQ ID NO:52); [GAGAGS (GVGVP)₄ GKGVP (GVGVP)₃(GAGAGS)₂]₁₂ (SEQ ID NO:53); [(GVGVP)₄GKGVP(GVGVP)₁₁(GAGAGS)₄]₅(GVGVP)₄GKGVP(GVGVP)₁₁(GAG AGS)₂(SEQ ID NO:54); [(GVGVP)₄(GKGVP)(GVGVP)₁₁(GAGAGS)₄]₇(GVGVP)₄GKGVP(GVGVP)₁₁(GA GAGS)₂ (SEQ ID NO:55); [(GVGVP)₄GKGVP(GVGVP)₁₁(GAGAGS)₄]₉(GVGVP)₄GKGVP(GVGVP)₁₁(GAG AGS)₂ (SEQ ID NO:56); [GAGS(GAGAGS)₂(GVGVP)₄GKGVP(GVGVP)₁₁(GAGAGS)₅GA]₆ (SEQ ID NO:57); [(GAGAGS)₂ (GVGVP)₁ LGPLGP (GVGVP)₃ GKGVP (GVGVP)₃]₁₅ (GAGAGS)₂ (SEQ ID NO:73); and [(GAGAGS)₂ (GVGVP)₁ GFFVRARR (GVGVP)₃ GKGVP (GVGVP)₃)₁₅(GAGAGS)₂ (SEQ ID NO:74). For example, the SELP is a polymer that is [(GAGAGS)₂(GVGVP)₄GKGVP (GVGVP)₃]₁₇ GAGAGS)₂ (SEQ ID NO:51); [(GAGAGS)₂-(GVGVP)₄-(GKGVP)-(GVGVP)₃-(GAGAGS)₂]₁₃ (SEQ ID NO:52); or [GAGS(GAGAGS)₂(GVGVP)₄GKGVP(GVGVP)₁₁(GAGAGS)₅GA]₆ (SEQ ID NO:57).

[0011] In any of the examples of compositions herein, the SELP can further contain an N-terminal head sequence and/or a C-terminal tail sequence. In one example, the N-terminal head sequence has the sequence of amino acids set forth as MDPVVLQRRDWENPGVTQLNRLAAHPPFASDPM (set forth in SEQ ID NO:58). In another example, the C-terminal tail sequence has the sequence of amino acids set forth as GAGAMDPGRYQDLRSHHHHHH (SEQ ID NO:59) or GAMDPGRYQDLRSHHHHHH (SEQ ID NO:60).

[0012] In particular examples of the compositions provided herein, the vaccinia virus is in a SELP that is SELP-27K (SEQ ID NOS: 61), SELP-47K (SEQ ID NO:62) or SELP-815K (SEQ ID NO:63).

[0013] In the compositions provided herein, the SELP is present in the composition at a weight percentage (wt %) of the composition of from or from about 2% (w/w) to about 50% (w/w), from about 2% (w/w) to about 35% (w/w), from about 2% (w/w) to about 20% (w/w), from about 2% (w/w) to about 12% (w/w), from about 4% (w/w) to about 50% (w/w), from about 4% (w/w) to about 35% w/w, from about 4% (w/w) to about 12%, from about 4% (w/w) to about 8% (w/w), from about 5% (w/w) to about 50% (w/w), from about 10% (w/w) to about 50% (w/w) or from about 20% (w/w) to about 35% (w/w). For example, the SELP is present in the composition at a weight percentage (wt %) of the composition of from at least about or about 4%, 5%, 6%, 7%, 8%, 9%, 10%, 11%, 12%, 13%, 14%, 15% or 20% (w/w).

[0014] In any of the compositions provided herein, the vaccinia virus in the composition can be a Lister, Western Reserve (WR), Copenhagen (Cop), Bern, Paris, Tashkent, Tian Tan, Wyeth (DRYVAX), 1′-ID-J, IHD-W, Brighton, Ankara, CVA382, Modified Vaccinia Ankara (MVA), Dairen I, LC16 m8, LC16M0, LIVP, ACAM2000, WR 65-16, Connaught, New York City Board of Health (NYCBH), EM-63 or a NYVAC strain. In particular example, the vaccinia virus is a Lister strain virus. For example, the vaccinia virus is an LIVP virus, a clonal strain of an LIVP virus, or a modified form thereof containing nucleic acid encoding a heterologous gene product. In one example, the LIVP virus or modified form thereof has a sequence of nucleotides set forth in SEQ ID NO:1, or a sequence of nucleotides that has at least 95% sequence identity to SEQ ID NO:1. In another example, the LIVP virus is a clonal strain of LIVP or a modified form thereof that has a sequence of nucleotides selected from: a) nucleotides 10,073-180,095 of SEQ ID NO:2, nucleotides 11,243-182,721 of SEQ ID NO:3, nucleotides 6,264-181,390 of SEQ ID NO:4, nucleotides 7,044-181,820 of SEQ ID NO:5, nucleotides 6,674-181,409 of SEQ ID NO:6, nucleotides 6,716-181,367 of SEQ ID NO:7 or nucleotides 6,899-181,870 of SEQ ID NO:8; orb) a sequence of nucleotides that has at least 97% sequence identity to a sequence of nucleotides 10,073-180,095 of SEQ ID NO:2, nucleotides 11,243-182,721 of SEQ ID NO:3, nucleotides 6,264-181,390 of SEQ ID NO:4, nucleotides 7,044-181,820 of SEQ ID NO:5, nucleotides 6,674-181,409 of SEQ ID NO:6, nucleotides 6,716-181,367 of SEQ ID NO:7 or nucleotides 6,899-181,870 of SEQ ID NO:8. In any of the examples of a vaccinia virus, including an LIVP virus or a clonal strain of an LIVP virus, the virus strain can contain a left and/or right inverted terminal repeat. In examples of the compositions herein, the vaccinia virus or modified form thereof contains a sequence of nucleotides set forth in SEQ ID NOS: 2-8, or a sequence of nucleotides that has at least 97% sequence identity to a sequence of nucleotides set forth in SEQ ID NO: 2-8.

[0015] For example, in any of the examples of compositions provided herein, the vaccinia virus is a modified form, such as a modified form of an LIVP virus or a clonal strain of an LIVP virus. The modified form is one where nucleic acid encoding a heterologous gene product is inserted into or in place of a non-essential gene or region in the genome of the virus. For example, the nucleic acid encoding the heterologous gene product is inserted at the hemagglutinin (HA), thymidine kinase (TIC), F14.5L, vaccinia growth factor (VGF), A35R, N1L, E2L/E3L, K1L/K2L, superoxide dismutase locus, 7.5K, C7-K1L, B13R+B14R, A26L or 14L gene loci in the genome of the virus. In such examples, the heterologous gene product is a therapeutic or reporter gene product. For example, the heterologous gene product is one that encodes an anticancer agent, an antimetastatic agent, an antiangiogenic agent, an immunomodulatory molecule, an antigen, a cell matrix degradative gene, genes for tissue regeneration and reprogramming human somatic cells to pluripotency, enzymes that modify a substrate to produce a detectable product or signal or are detectable by antibodies, proteins that can bind a contrasting agent, genes for optical imaging or detection, genes for PET imaging and genes for MRI imaging. In one example, the heterologous gene product is an antimetastatic agent and the antimetastatic agent inhibits metastatic colonization or inhibits cell invasion in an in vitro cell invasion assay. For example, the heterologous gene product is an antiangiogenic agent and the antiangiogenic agent inhibits blood vessel formation in a tumor.

[0016] In examples of the compositions provided herein, the vaccinia virus is modified by insertion of nucleotides that encode a heterologous gene product that is a therapeutic agent or protein that is a hormone, a growth factor, cytokine, a chemokine, a costimulatory molecule, ribozymes, a transporter protein, a single chain antibody, an antisense RNA, a prodrug converting enzyme, an siRNA, a microRNA, a toxin, an antitumor oligopeptide, a mitosis inhibitor protein, an antimitotic oligopeptide, an anti-cancer polypeptide antibiotic, an angiogenesis inhibitor, a tumor suppressor, a cytotoxic protein, a cytostatic protein and a tissue factor. For example, the heterologous gene product can be a therapeutic protein that is a granulocyte macrophage colony stimulating factor (GM-CSF), monocyte chemotactic protein-1 (MCP-1), interleukin-6 (IL-6), interleukin-24 (IL-24), interferon gamma-induced protein 10 (IP-10), lymphotoxin inducible expression competes with HSV glycoprotein D for HVEM a receptor expressed on T-lymphocytes (LIGHT), p60 superantigen, OspF, OspG, signal transducer and activator of transcription protein (STATlalpha), STAT1beta, plasminogen k5 domain (hK5), pigment epithelium-differentiation factor (PEDF), single chain anti-VEGF antibody, single chain anti-DLL4 antibody, single chain anti-fibroblast activation protein (FAP), NM23, cadherin 1 (ECAD or cdhl), relaxin 1 (RLN1), matrix metallopeptidase 9 (MMP9), erythropoietin (EPO), microRNAl26 (miR-126), microRNA 181, microRNA 335, manganese superoxide dismutase (MnSOD), E3 ubiquitin protein ligase 1 (HACE1), natriuretic peptide precursor A (nppa1), carboxypeptidase G2 (CPG2), alcohol dehydrogenase (ADH), CDC6, or bone morphogenetic protein 4 (BMP4).

[0017] In other examples of the compositions provided herein, the vaccinia virus is modified by insertion of nucleotides that encode a heterologous gene product that is a reporter gene product. The reporter gene product can be a fluorescent protein, a bioluminescent protein, an enzyme, or a cell surface protein that is capable of detection. For example, the cell surface protein is a receptor, transporter or ligand that binds to a detectable moiety or a moiety that is capable of detection. In such examples, the detectable moiety is selected from among a radiolabel, a chromogen, or a fluorescent moiety. In another example, the receptor or transporter protein is an iron receptor, an iron transporter, a copper uptake transporter or an ion transporter protein. For example, the receptor or transporter protein is an ion transporter protein that is a sodium ion transporter, such as a sodium ion transporter that is a norepinephrine transporter (NET) or the sodium iodide symporter (NIS). In other examples, the reporter is a fluorescent protein that is a green fluorescent protein, an enhanced green fluorescent protein, a blue fluorescent protein, a cyan fluorescent protein, a yellow fluorescent protein, a red fluorescent protein, or a far-red fluorescent protein. For example, the fluorescent protein is TurboFP635. In further examples, the reporter is an enzme, such as a luciferase, β-glucuronidase, β-galactosidase, chloramphenicol acetyl tranferase (CAT), alkaline phosphatase, or horseradish peroxidase. In some examples, the enzyme is one that can be detected by reaction of the enzyme with a substrate. For example, provided herein are compositions containing a vaccinia virus, such as an LIVP virus, that is modified by insertion of nucleotides that encode a heterologous gene product that is a green click beetle luciferase, a lux operon, an infrared fluorescent protein, a flavin reductase protein, mNeptune far-red fluorescent protein, green fluorescent protein (GFP), red fluorescent protein (RFP), coelenterazine-binding protein (CBP), human epinephrine receptor (hNET), a sodium iodide symporter (NIS) protein, a cytochrome p450 family enzyme, allostatin A receptor (AlstR), Pep1 Receptor (PEPR-1), LAT-4, sterol 14 alpha-demethylase (Cyp51), transferrin receptor (TR), ferritin, divalent metal transporter (DMT), Magnetotactic A (MagA), cisplatin influx transporter (CTRL), newt AG (nAG), Oct4, NANOG, Ngn3, Pdx1 or Mafa.

[0018] In examples of the compositions provided herein, the vaccinia virus is modified by insertion of nucleotides that encodes a heterologous gene product, wherein the nucleic acid encoding the heterologous gene product is operably linked to a promoter. The promoter can be a mammalian promoter or a viral promoter. For example, the promoter is selected from among P_{7.5k}, P₁₁ₖ, P_{SE}, P_{SEL}, P_{SL}, H5R, TK, P28, C11R, G8R, F17R, I3L, I8R, A1L, A2L, A3L, H1L, H3L, H5L, H6R, H8R, D1R, D4R, D5R, D9R, D11L, D12L, D13L, M1L, N2L, P4b or K1 promoters.

[0019] Among the vaccinia viruses contained in compositions provided herein are vaccinia viruses that have a sequence of nucleotides selected from among any of SEQ ID NOS:9, 18-23 and 25, or a sequence of nucleotides that exhibits at least 97% sequence identity to any of SEQ ID NOS: 9, 18-23 and 25. For example, the vaccina virus can contain a sequence of nucleotides that exhibits at least 98% or at least 99% sequence identity to any of SEQ ID NOS: 9, 18-23 and 25.

[0020] In any of the compositions provided herein, the vaccinia virus is present in the composition in an amount that is from or from about 1×10⁵ to 1×10¹² pfu, 1×10⁶ to 1×10¹⁰ pfu or 1×10⁷ to 1×10¹⁰ pfu. For example, the vaccinia virus can be present in the composition in an amount that is at least or about at least or 1×10⁶, 1×10⁷, 1×10⁸, 1×10⁹, 2×10⁹, 3×10⁹, 4×10⁹, or 5×10⁹ pfu.

[0021] In examples of any of the compositions provided herein, the volume of the compositions can be from or from about 0.01 mL to 100 mL, 0.1 mL to 100 mL, 1 mL to 100 mL, 10 mL to 100 mL, 0.01 mL to 10 mL, 0.1 mL to 10 mL, 1 mL to 10 mL, 0.02 mL to 20 mL, 0.05 mL to 5 mL, 0.5 mL to 50 mL or 0.5 mL to 5 mL. For example, the volume of the composition is at least or about at least or 0.05 mL, 0.5 mL, 1 mL, 2 mL, 3 mL, 4 mL, 5 mL, 6 mL, 7 mL, 8 mL, 9 mL or 10 mL. In examples herein, the compositions can be formulated for direct administration.

[0022] Any of the compositions provided herein can further contain a pharmaceutically acceptable carrier. The compositions can be formulated for use in therapy as pharmaceutical compositions. The compositions provided herein can be formulated for local or systemic injection. For example, the compositions can be formulated for intravenous administration. In other examples, the compositions are formulated for topical administration.

[0023] Provided herein are combinations containing a composition containing a vaccinia virus in protein polymer, such as any of the compositions provided herein, and an anti-cancer agent. The anticancer agent can be a cytokine, a chemokine, a growth factor, a photosensitizing agent, a toxin, an anti-cancer antibiotic, a chemotherapeutic compound, a radionuclide, an angiogenesis inhibitor, a signaling modulator, an anti-metabolite, an anti-cancer vaccine, an anti-cancer oligopeptide, a mitosis inhibitor protein, an antimitotic oligopeptide, an anticancer antibody, an anti-cancer antibiotic, an immunotherapeutic agent or a combination of any of the preceding thereof.

[0024] Provided herein are methods of treating a disease or condition in a subject that is any disease or condition that is or can be treated by a vaccinia virus by administering to a subject a composition containing a vaccinia virus in a protein polymer, such as any of the compositions provided herein. Medical uses of the compositions provided herein include use of any of the compositions provided herein for treating a disease or condition that is or can be treated by a vaccinia virus. Hence, any of the compositions provided herein can be formulated as a medicament for treating a disease or condition in a subject that is any disease or condition that is or can be treated by a vaccinia virus. For example, in any of the methods, uses or compositions provided herein, the disease or condition is a proliferative disorder or condition. The proliferative disorder or condition can be a cancer or a wound, in particular a wound healing disorder or condition. The wound can be an internal or an external wound. In some examples, the wound is a dermal wound (e.g. keloid and hypertrophic scars and other similar wounds). Hence, examples of methods, uses and compositions provided herein are any for treating a cancer in a subject. Other examples of methods, uses or compositions provided herein are any for treating a wound disorder or condition, such as a wound healing disorder or condition, in a subject.

[0025] In any of the methods provided herein, the composition is administered locally or systemically. For example, the composition is administered intravenously, intraarterially, intratumorally, endoscopically, intralesionally, intramuscularly, intradermally, intraperitoneally, intravesicularly, intraarticularly, intrapleurally, percutaneously, subcutaneously, orally, parenterally, intranasally, intratracheally, by inhalation, intracranially, intraprostaticaly, intravitreally, topically, ocularly, vaginally, or rectally. In some examples, the composition is administered locally inside a body cavity.

[0026] In examples of the methods, uses and compositions provided herein, the proliferative disease is cancer. The cancer can be a carcinoma, sarcoma, lymphoma or leukemia. For example, the cancer is a cancer of the tongue, mouth, throat, stomach, cecum, colon, rectum, breast, ovary, uterus, thyroid, adrenal cortex, lung, kidney, prostate or pancreas. In examples herein, the proliferative disorder is a tumor or a metastasis. For example, the tumor is a solid tumor. In particular examples of methods provided herein for treating a cancer, such as a tumor or solid tumor, the composition is administered intravenously.

[0027] In other examples of the methods, uses or compositions provided herein, the proliferative disease is a surface or skin wound. In one example of the methods, uses, or compositions provided herein, the proliferative disease is a cancer that is a tumor, and in particular is a surgically resected tumor. The surgically resected tumor can be any tumor where the volume of the residual tumor is 10 mm³ to 300 m³, 10 mm³ to 100 mm³, 25 mm³ to 100 mm³, 50 mm³ to 100 mm³, 50 mm³ to 250 mm³ or 100 mm³ to 200 mm³. For example, the volume of the residual tumor is less than 100 mm³, 90 mm³, 80 mm³, 70 mm³, 60 mm³, 50 mm³, 40 mm³, 30 mm³ or 20 mm³. In other examples of methods, uses or compositions provided herein, the proliferative disease is a cancer that is a skin cancer. For example, the skin cancer is a melanoma, a basal cell carcinoma of the skin or a squamous cell carcinoma. In particular examples of the methods provided herein for treating a proliferative disease that is a surface or skin wound, for example a surgically resected tumor or skin cancer, the composition is administered topically.

[0028] In any of the examples of the methods provided herein, the subject is a human or non-human animal. For example, the subject is a non-human animal that is a horse, cat, dog, cow, pig, sheep, goat, mouse, rabbit, chicken, rat, and guinea pig.

[0029] In any of the methods provided herein, the composition is administered to deliver at least or about 1×10⁵ pfu of virus. For example, the composition is administered to deliver an amount of virus that is at least or about or is 1×10⁶ pfu, 1×10⁷ pfu, 1×10⁸ pfu, 1×10⁹ pfu, 1×10¹⁰ pfu, 1×10¹¹ pfu, 1×10¹² pfu, 1×10¹³ pfu, or 1×10¹⁴ pfu. In examples of the methods provided herein, any of the compositions provided herein can be administered two times, three times, four times, five times, six times or seven times.

[0030] In any of the methods provided herein, the method can further include administering a second therapeutic agent or treatment for the treatment of the proliferative disorder. In one example, the other treatment can be surgery, radiation therapy, immunosuppressive therapy or administration of an anticancer agent. For example, the anticancer agent can be a cytokine, a chemokine, a growth factor, a photosensitizing agent, a toxin, an anti-cancer antibiotic, a chemotherapeutic compound, a radionuclide, an angiogenesis inhibitor, a signaling modulator, an anti-metabolite, an anti-cancer vaccine, an anti-cancer oligopeptide, a mitosis inhibitor protein, an antimitotic oligopeptide, an anticancer antibody, an anti-cancer antibiotic, an immunotherapeutic agent or a combination of any of the preceding thereof. For example, the anticancer agent is cisplatin, carboplatin, gemcitabine, irinotecan, an anti-EGFR antibody or an anti-VEGF antibody. In such examples, the composition and the other treatment or therapeutic agent, for example anticancer agent, are administered sequentially, simultaneously, or intermittently.

[0031] Also provided herein is a device containing a composition containing a vaccinia virus in protein polymer, such as any of the compositions provided herein. In such examples, the composition can be coated on a surface of the device. The device can be any device that is capable of being applied to a surface of the body of a subject. For example, the device is a patch, bandage, wrap, dressing, suture, film or mesh. In particular examples, the device is a wound dressing or bandage.

[0032] Provided herein are method of treating a skin lesion in a subject by applying any of the devices provided herein to the surface of the skin of a subject to cover the skin lesion. Also provided are any of the devices provided herein for use in treating a skin lesion in a subject. The skin lesion is a wound or other proliferative skin lesion. The proliferative skin lesion can be one that is benign, premalignant or malignant. For example, the proliferative skin lesion is a skin cancer. The skin cancer can be a melanoma, a basal cell carcinoma of the skin or a squamous cell carcinoma. In other example, the wound is a traumatic wound or a post-surgical wound. For example, the wound is a traumatic wound that is a burn, scrape or cut. For example, the wound is a post-surgical wound that is a surgically resected tumor. In any of the methods provided herein for treating a skin lesion in a subject, the subject is a human or non-human animal. For example, the subject is a non-human animal that is a horse, cat, dog, cow, pig, sheep, goat, mouse, rabbit, chicken, rat, or guinea pig.

### DETAILED DESCRIPTION

### Outline

[0033] A. Definitions

[0034] B. Virus Polymer Compositions and Methods of Viral Delivery and Treatment
[0035] 1. Vaccinia Viruses
[0036] 2. Delivery of Vaccinia Viruses
[0037] 3. SELP Compositions

[0038] C. Vaccinia Viruses and LIVP
[0039] 1. Lister and LIVP Strains
[0040] 2. Heterologous Nucleic Acid and Modified Viruses
   [0041] a. Exemplary Modifications
      [0042] i. Diagnositc or Reporter Gene Products
      [0043] ii. Therapeutic Gene Products
      [0044] iii. Modifications to alter attenuation of the viruses
   [0045] b. Exemplary Modified or Recombinant Viruses
   [0046] c. Control of Heterologous Gene Expression
   [0047] d. Methods of Generating Modified Viruses
[0048] 3. Methods of Producing Viruses
   [0049] a. Host cells for Propagation
   [0050] b. Concentration Determination
   [0051] c. Storage Methods
   [0052] d. Preparation of Virus

[0053] D. Protein Polymers
[0054] 1. Silk-elastin Like Polymers (SELP)
[0055] 2. Methods of Preparing and Generating Polymers

[0056] E. Vaccinia Virus-Protein Polymer (VV-Polymer) Compositions
[0057] 1. Methods of Making Compositions
[0058] 2. Exemplary VV-SELP Compositions
[0059] 3. Dosage Forms, Carriers and Excipients
[0060] 4. Combinations
[0061] 5. Kits

[0062] F. Devices and Articles of Manufacture

[0063] G. Assays to Assess Virus Activity or Composition Properties
[0064] 1. Characterization of Hydrogel Compositions
[0065] 2. Evaluation of Virus Diffusion or Release
[0066] 3. Evaluation of Viral Integrity
[0067] 4. Anti-Tumorigenicity and Efficacy
   [0068] a. Tumor-Associated Replication Indicator
   [0069] b. Cytotoxicity
   [0070] c. Tumor Growth
[0071] 5. Toxicity/Safety

[0072] H. Therapeutic, Diagnositic and Monitoring Methods
[0073] 1. Therapeutic or Diagnostic Methods
   [0074] a. Systemic Delivery to Treat or Detect Proliferative or Inflammatory Cells or Tissues (e.g. Tumors)
   [0075] b. Delivery to Treat or Detect Wounds of Hyperproliferative Surface Lesions
      [0076] Surgically Resected Tumor
[0077] 2. Dosages and Dosage Regime
[0078] 3. Combination Therapy
   [0079] a. Oncolytic or Therapeutic Virus
   [0080] b. Therapeutic Compounds
[0081] 4. Monitoring
   [0082] a. Monitoring viral gene expression
   [0083] b. Monitoring tumor size
   [0084] c. Monitoring antibody titer
   [0085] d. Monitoring general health diagnostics
   [0086] e. Monitoring coordinated with treatment

[0087] I. Examples

### A. DEFINITIONS

[0088] Unless defined otherwise, all technical and scientific terms used herein have the same meaning as is commonly understood by one of skill in the art to which the invention(s) belong. All patents, patent applications, published applications and publications, Genbank sequences, databases, websites and other published materials referred to throughout the entire disclosure herein, unless noted otherwise, are incorporated by reference in their entirety. In the event that there are a plurality of definitions for terms herein, those in this section prevail. Where reference is made to a URL or other such identifier or address, it is understood that such identifiers can change and particular information on the interne can come and go, but equivalent information can be found by searching the internet. Reference thereto evidences the availability and public dissemination of such information.

[0089] As used herein, a matrix is a surrounding substance within which something else is contained. For purposes herein, a matrix refers to the structural properties or architecture of a solid or semi-solid (including a hydrogel) in which other components can be cast, mixed, dispersed or dissolved. For example, a matrix can contain atherapeutic product or virus.

[0090] As used herein, a liquid or fluid refers to a composition that flows freely.

[0091] As used herein, a hydrogel matrix or hydrogel refers to a semisolid composition constituting a substantial amount of water. A hydrogel can be formed from a network of polymer chains in which polymers or mixtures thereof are dissolved or dispersed. Hydrogels are composed of polymers that will swell without dissolving when placed in water or other biological fluids. A hydrogel is significantly more viscous than water or other similar liquid. Hence, for purposes herein, a hydrogel is generally a non-liquid form.

[0092] As used herein, viscous refers to a composition that exhibits a resistance to flow compared to water, and therefore exhibits a higher viscosity than water. For example, a viscous substance or composition is one that is has a thick consistency, between a solid and a liquid.

[0093] As used herein, viscosity refers to a measure of the resistance of fluid to flow. Viscosity can be measured in centipoise (cp), whereby water is the standard at 1 cps. Viscosity can be measured using a tube viscosimeter, a rotational viscometer (e.g. a cone plate type viscometer), a Gilmont viscometer, cannon capillary viscometer and other similar devices or apparatuses well known to one of skill in the art. Method and techniques for measuring or assessing viscosity of a sample are well known to one of skill in the art.

[0094] As used herein, a polymer refers to a molecule composed of a number of repeat units.

[0095] As used herein, a protein polymer refers to a polymer made up of repeating amino acid sequence units, wherein the repeating units are derived from a natural or synthetic protein. For example, in some embodiments, the repeating sequence units are derived from natural supporting structure materials such as silk, elastin, collagen and keratin. In alternative embodiments, the repeating sequence units are derived from synthetic structures. The polymer can be a polypeptide having an amino acid sequence made up of repeating units of smaller, identical monomer units linked together. Polymers can have high molecular weights of 5 kD to 200 kD, generally at least 15 kD, such as at least 20 kD, 30 kD, 40 kD, 50 kD, 60 kD, 70 kD, 80 kD, 90 kD, 100 kD or more. Exemplary protein polymers herein are any that are capable of irreversibly transitioning from liquid solution to a hydrogel gel (sol-to-gel transition). The transition generally can occur spontaneously as a function of time, temperature, concentration of polymer, and other factors. In particular, protein polymers herein are capable of sol-to-gel transition at physiologic temperatures.

[0096] As used herein, a silk-elastinlike polymer (SELP) refers to a protein polymer containing alternating units of silk-like units and elastin-like units and that is capable of transitioning from a liquid to a hydrogel. The transition generally can occur spontaneously as a function of time, temperature, concentration of polymer, and other factors. In particular, SELPs herein are capable of sol-to-gel transition at physiologic temperatures. Silk provides cross linking capability and renders mechanical strength, while elastin enhances aqueous solubility. A SELP typically has the formula {[S]ₘ[E]ₙ}_{O}, whereby S is the silk-like amino acid sequence; m is the number of silk-like amino acid units; E is the elastin-like amino acid sequence; n is the number of elastin-like amino acid units; and o is the number of monomer repeats. The particular amino acid sequence of the silk-like or elastin-like unit and the number of units and repeats of monomer units can be empirically determined as described herein or known to one of skill in the art. SELPs also can contain intervening sequences between the silk-like and elastin-like units. SELPs are known in the art (see e.g. U.S. Pat. No. 5,606,019; U.S. Pat. No. 5,723,588; U.S. Pat. No. 5,770,697; U.S. Pat. No. 6,380,154; U.S. Pat. No. 6,423,333; Megeed et al. (2002) Advanced Drug Delivery Reviews, 54:1075-1091; Cappello et al. (1998) Journal of Controlled Release, 53:105-117; Gustafson et al. (2010) Advanced Drug Delivery Reviews, 62:1509-1523; Haider et al. (2004) Molecular Pharmaceutics, 2:139-150; Hatefi et al. (2007) Pharmaceutical Research, 24:773). Exemplary SELPs are set forth in Table 6 and contain repeating sequences set forth in any of SEQ ID NOS: 39-57, 73 and 74. In particular, reference to SELPs herein include SELP-27K (SEQ ID NO: 61); SELP-47K (SEQ ID NO:62) and SELP-815K (SEQ ID NO:63).

[0097] As used herein, a silk-like unit refers to a sequence of amino acids found naturally in silk fibroid protein and that promote protein crystallization by permitting formation of hydrogen bonds. Exemplary of such sequences are GAGAGS (SEQ ID NO:26) or SGAGAG (SEQ ID NO:27). Reference to silk-like units also include variants thereof that effect or influence hydrogen bond formation, and hence gelation, of the protein polymer.

[0098] As used herein, an elastin-like unit refers to a sequence of amino acids found in naturally occurring elastin and that influence water solublility. Exemplary of such sequences are GVGVP (SEQ ID NO.29), VPGG (SEQ ID NO:30), APGVGV (SEQ ID NO:31), or VPGVG (SEQ ID NO:32). Reference to elastin-like units also include variants thereof that confer or influence aqueous solubility of the protein polymer. Exemplary of such variants are GXGVP (SEQ ID NO:35) or VPGXG (SEQ ID NO:36), such as VPGKG (SEQ ID NO:37) or GKGVP (SEQ ID NO:38).

[0099] A “variant” with reference to a silk-like unit or elastin-like unit refers to a silk-like unit or elastin-like unit that has an amino acid sequence that is altered by one or more amino acids. Typically, a unit sequence is altered by 1, 2 or 3 amino acids. The variant can have an amino acid replacement(s), deletions or insertions. For example, the variant can have “conservative” changes, wherein a substituted amino acid has similar structural or chemical properties (e.g. replacement of leucine with isoleucine). Exemplary conservative amino acid substitutions are set forth in Table 1. In some cases, a variant can have “nonconservative” changes (e.g., replacement of a glycine with a tryptophan). Similar minor variations can also include amino acid deletions or insertions, or both. In addition to the teaching herein, guidance in determining which amino acid residues can be substituted, inserted, or deleted without abolishing bioactivity can be found using computer programs well known in the art, for example, DNASTAR software.

[0100] As used herein, suitable conservative substitutions of amino acids are known to those of skill in this art and can be made generally without altering the biological activity of the resulting molecule. Those of skill in this art recognize that, in general, single amino acid substitutions in non-essential regions of a polypeptide do not substantially alter biological activity (see, e.g., Watson et al. Molecular Biology of the Gene, 4th Edition, 1987, The Benjamin/Cummings Pub. co., p. 224). Such substitutions can be made in accordance with those set forth in TABLE 1 as follows:

TABLE 1

| Original residue | Exemplary conservative substitution |
|---|---|
| Ala (A) | Gly; Ser |
| Arg (R) | Lys |
| Asn (N) | Gln; His |
| Cys (C) | Ser |
| Gln (Q) | Asn |
| Glu (E) | Asp |
| Gly (G) | Ala; Pro |
| His (H) | Asn; Gln |
| Ile (I) | Leu; Val |
| Leu (L) | Ile; Val |
| Lys (K) | Arg; Gln; Glu |
| Met (M) | Leu; Tyr; Ile |
| Phe (F) | Met; Leu; Tyr |
| Ser (S) | Thr |
| Thr (T) | Ser |
| Trp (W) | Tyr |
| Tyr (Y) | Trp; Phe |
| Val (V) | Ile; Leu |

Other substitutions also are permissible and can be determined empirically or in accord with known conservative substitutions.

[0101] As used herein, reference to physiologic temperature refers to the body temperature of a subject, and generally is or is about 37.0° C.±0.5° C., such as or about 37.0° C.

[0102] As used herein, a “vaccinia in protein polymer composition” or “VV-protein polymer” refers to a vaccinia virus that is contained in a protein polymer hydrogel matrix when formed. For purposes herein, since liquid forms are capable of transitioning to a hydrogel form, reference to a VV-protein polymer refers to both liquid and non-liquid forms of the composition.

[0103] As used herein, a “vaccinia in SELP composition” or “VV-SELP” or “LIVP-SELP” refers to a vaccinia virus, such as an LIVP, that is contained in a SELP hydrogel matrix when formed. For purposes herein, since liquid forms are capable of transitioning to a hydrogel form, reference to a VV-SELP or LIVP-SELP refers to both liquid and non-liquid forms of the composition.

[0104] As used herein, “virus” refers to any of a large group of infectious entities that cannot grow or replicate without a host cell. Viruses typically contain a protein coat surrounding an RNA or DNA core of genetic material, but no semipermeable membrane, and are capable of growth and multiplication only in living cells. Viruses include, but are not limited to, poxviruses, herpesviruses, adenoviruses, adeno-associated viruses, lentiviruses, retroviruses, rhabdoviruses, papillomaviruses, vesicular stomatitis virus, measles virus, Newcastle disease virus, picornavirus, Sindbis virus, papillomavirus, parvovirus, reovirus, coxsackievirus, influenza virus, mumps virus, poliovirus, and semliki forest virus.

[0105] As used herein, plaque forming unit (pfu) or infectious unit (IU) refers to the number of infectious or live viruses. It thus reflects the amount of active virus in the preparation. The pfu can be determined using a plaque formation assay or an end-point dilution assay, which are standard assays known to one of skill in the art.

[0106] As used herein, oncolytic viruses refer to viruses that replicate selectively in tumor cells in tumorous subjects. Some oncolytic viruses can kill a tumor cell following infection of the tumor cell. For example, an oncolytic virus can cause death of the tumor cell by lysing the tumor cell or inducing cell death of the tumor cell.

[0107] As used herein the term “vaccinia virus” or “VACV” or “VV” denotes a large, complex, enveloped virus belonging to the poxvirus family. It has a linear, double-stranded DNA genome approximately 190 kbp in length, and which encodes approximately 200 proteins. Vaccinia virus strains include, but are not limited to, strains of, derived from, or modified forms of Western Reserve (WR), Copenhagen, Tashkent, Tian Tan, Lister, Wyeth, IHD-J, and IHD-W, Brighton, Ankara, MVA, Dairen I, LIPV, LC16M8, LC16MO, LIVP, WR 65-16, Connaught, New York City Board of Health vaccinia virus strains.

[0108] As used herein, Lister Strain of the Institute of Viral Preparations (LIVP) or LIVP virus strain refers to a virus strain that is the attenuated Lister strain (ATCC Catalog No. VR-1549) that was produced by adaption to calf skin at the Institute of Viral Preparations, Moscow, Russia (Al'tshtein et al. (1985) Dokl. Akad. Nauk USSR 285:696-699). The LIVP strain can be obtained, for example, from the Institute of Viral Preparations, Moscow, Russia (see. e.g., Kutinova et al. (1995) Vaccine 13:487-493); the Microorganism Collection of FSRI SRC VB Vector (Kozlova et al. (2010) Environ. Sci. Technol. 44:5121-5126); or can be obtained from the Moscow Ivanovsky Institute of Virology (C0355 K0602; Agranovski et al. (2006) Atmospheric Environment 40:3924-3929). It also is well known to those of skill in the art; it was the vaccine strain used for vaccination in the USSR and throughout Asia and India. The strain now is used by researchers and is well known (see e.g., Altshteyn et al. (1985) Dokl. Akad. Nauk USSR 285:696-699; Kutinova et al. (1994) Arch. Virol. 134:1-9; Kutinova et al. (1995) Vaccine 13:487-493; Shchelkunov et al. (1993) Virus Research 28:273-283; Sroller et al. (1998) Archives Virology 143:1311-1320; Zinoviev et al., (1994) Gene 147:209-214; and Chkheidze et al. (1993) FEBS 336:340-342). Among the LIVP strains is one that contains a genome having a sequence of nucleotides set forth in SEQ ID NO:1, or a sequence that is at least or at least about 97%, 98% or 99% identical to the sequence of nucleotides set forth in SEQ ID NO:1. An LIVP virus strain encompasses any virus strain or virus preparation that is obtained by propagation of LIVP through repeat passage in cell lines.

[0109] As used herein, an LIVP clonal strain or LIVP clonal isolate refers to a virus that is derived from the LIVP virus strain by plaque isolation, or other method in which a single clone is propagated, and that has a genome that is homogenous in sequence. Hence, an LIVP clonal strain includes a virus whose genome is present in a virus preparation propagated from LIVP. An LIVP clonal strain does not include a recombinant LIVP virus that is genetically engineered by recombinant means using recombinant DNA methods to introduce heterologous nucleic acid. In particular, an LIVP clonal strain has a genome that does not contain heterologous nucleic acid that contains an open reading frame encoding a heterologous protein. For example, an LIVP clonal strain has a genome that does not contain non-viral heterologous nucleic acid that contains an open reading frame encoding a non-viral heterologous protein. As described herein, however, it is understood that any of the LIVP clonal strains provided herein can be modified in its genome by recombinant means to generate a recombinant virus. For example, an LIVP clonal strain can be modified to generate a recombinant LIVP virus that contains insertion of nucleotides that contain an open reading frame encoding a heterologous protein.

[0110] As used herein, LIVP 1.1.1 is an LIVP clonal strain that has a genome having a sequence of nucleotides set forth in SEQ ID NO:2, or a genome having a sequence of nucleotides that has at least 97%, 98%, or 99% sequence identity to the sequence of nucleotides set forth in SEQ ID NO:2.

[0111] As used herein, LIVP 2.1.1 is an LIVP clonal strain that has a genome having a sequence of nucleotides set forth in SEQ ID NO:3, or a genome having a sequence of nucleotides that has at least 97%, 98%, or 99% sequence identity to the sequence of nucleotides set forth in SEQ ID NO:3.

[0112] As used herein, LIVP 4.1.1 is an LIVP clonal strain that has a genome having a sequence of nucleotides set forth in SEQ ID NO:4, or a genome having a sequence of nucleotides that has at least 97%, 98% or 99% sequence identity to the sequence of nucleotides set forth in SEQ ID NO:4.

[0113] As used herein, LIVP 5.1.1 is an LIVP clonal strain that has a genome having a sequence of nucleotides set forth in SEQ ID NO:5, or a genome having a sequence of nucleotides that has at least 97%, 98% or 99% sequence identity to the sequence of nucleotides set forth in SEQ ID NO:5.

[0114] As used herein, LIVP 6.1.1 is an LIVP clonal strain that has a genome having a sequence of nucleotides set forth in SEQ ID NO:6, or a genome having a sequence of nucleotides that has at least 97%, 98% or 99% sequence identity to the sequence of nucleotides set forth in SEQ ID NO:6.

[0115] As used herein, LIVP 7.1.1 is an LIVP clonal strain that has a genome having a sequence of nucleotides set forth in SEQ ID NO:7, or a genome having a sequence of nucleotides that has at least 97%, 98% or 99% sequence identity to the sequence of nucleotides set forth in SEQ ID NO:7.

[0116] As used herein, LIVP 8.1.1 is an LIVP clonal strain that has a genome having a sequence of nucleotides set forth in SEQ ID NO:8, or a genome having a sequence of nucleotides that has at least 97%, 98% or 99% sequence identity to the sequence of nucleotides set forth in SEQ ID NO:8.

[0117] As used herein, the term “modified virus” refers to a virus that is altered compared to a parental strain of the virus. Typically modified viruses have one or more truncations, mutations, insertions or deletions in the genome of virus. A modified virus can have one or more endogenous viral genes modified and/or one or more intergenic regions modified. Exemplary modified viruses can have one or more heterologous nucleic acid sequences inserted into the genome of the virus. Modified viruses can contain one or more heterologous nucleic acid sequences in the form of a gene expression cassette for the expression of a heterologous gene.

[0118] As used herein, a modified LIVP virus strain refers to an LIVP virus that has a genome that is not contained in LIVP, but is a virus that is produced by modification of a genome of a strain derived from LIVP. Typically, the genome of the virus is modified by substitution (replacement), insertion (addition) or deletion (truncation) of nucleotides. Modifications can be made using any method known to one of skill in the art such as genetic engineering and recombinant DNA methods. Hence, a modified virus is a virus that is altered in its genome compared to the genome of a parental virus. Exemplary modified viruses have one or more heterologous nucleic acid sequences inserted into the genome of the virus. Typically, the heterologous nucleic acid contains an open reading frame encoding a heterologous protein. For example, modified viruses herein can contain one or more heterologous nucleic acid sequences in the form of a gene expression cassette for the expression of a heterologous gene.

[0119] As used herein, synthetic, with reference to, for example, a synthetic nucleic acid molecule or a synthetic gene or a synthetic peptide refers to a nucleic acid molecule or polypeptide molecule that is produced by recombinant methods and/or by chemical synthesis methods.

[0120] As used herein, “production by recombinant methods” or “methods using recombinant DNA methods” or variations thereof refers to the use of the well known methods of molecular biology for expressing proteins encoded by cloned DNA.

[0121] As used herein a “gene expression cassette” or “expression cassette” is a nucleic acid construct, containing nucleic acid elements that are capable of effecting expression of a gene in hosts that are compatible with such sequences. Expression cassettes include at least promoters and optionally, transcription termination signals. Typically, the expression cassette includes a nucleic acid to be transcribed operably linked to a promoter. Expression cassettes can contain genes that encode, for example, a therapeutic gene product, or a detectable protein or a selectable marker gene.

[0122] As used herein, a heterologous nucleic acid (also referred to as exogenous nucleic acid or foreign nucleic acid) refers to a nucleic acid that is not normally produced in vivo by an organism or virus from which it is expressed or that is produced by an organism or a virus but is at a different locus, or that mediates or encodes mediators that alter expression of endogenous nucleic acid, such as DNA, by affecting transcription, translation, or other regulatable biochemical processes. Hence, heterologous nucleic acid is often not normally endogenous to a virus into which it is introduced. Heterologous nucleic acid can refer to a nucleic acid molecule from another virus in the same organism or another organism, including the same species or another species. Heterologous nucleic acid, however, can be endogenous, but is nucleic acid that is expressed from a different locus or altered in its expression or sequence (e.g., a plasmid). Thus, heterologous nucleic acid includes a nucleic acid molecule not present in the exact orientation or position as the counterpart nucleic acid molecule, such as DNA, is found in a genome. Generally, although not necessarily, such nucleic acid encodes RNA and proteins that are not normally produced by the virus or in the same way in the virus in which it is expressed. Any nucleic acid, such as DNA, that one of skill in the art recognizes or considers as heterologous, exogenous or foreign to the virus in which the nucleic acid is expressed is herein encompassed by heterologous nucleic acid. Examples of heterologous nucleic acid include, but are not limited to, nucleic acid that encodes exogenous peptides/proteins, including diagnostic and/or therapeutic agents. Proteins that are encoded by heterologous nucleic acid can be expressed within the virus, secreted, or expressed on the surface of the virus in which the heterologous nucleic acid has been introduced.

[0123] As used herein, a heterologous protein or heterologous polypeptide (also referred to as exogenous protein, exogenous polypeptide, foreign protein or foreign polypeptide) refers to a protein that is not normally produced by a virus.

[0124] As used herein, operative linkage of heterologous nucleic acids to regulatory and effector sequences of nucleotides, such as promoters, enhancers, transcriptional and translational stop sites, and other signal sequences refers to the relationship between such nucleic acid, such as DNA, and such sequences of nucleotides. For example, operative linkage of heterologous DNA to a promoter refers to the physical relationship between the DNA and the promoter such that the transcription of such DNA is initiated from the promoter by an RNA polymerase that specifically recognizes, binds to and transcribes the DNA. Thus, operatively linked or operationally associated refers to the functional relationship of a nucleic acid, such as DNA, with regulatory and effector sequences of nucleotides, such as promoters, enhancers, transcriptional and translational stop sites, and other signal sequences. For example, operative linkage of DNA to a promoter refers to the physical and functional relationship between the DNA and the promoter such that the transcription of such DNA is initiated from the promoter by an RNA polymerase that specifically recognizes, binds to and transcribes the DNA. In order to optimize expression and/or transcription, it can be necessary to remove, add or alter 5′ untranslated portions of the clones to eliminate extra, potentially inappropriate, alternative translation initiation (i.e., start) codons or other sequences that can interfere with or reduce expression, either at the level of transcription or translation. In addition, consensus ribosome binding sites can be inserted immediately 5′ of the start codon and can enhance expression (see, e.g., Kozak J. Biol. Chem. 266: 19867-19870 (1991) and Shine and Delgarno, Nature 254(5495):34-38 (1975)). The desirability of (or need for) such modification can be empirically determined.

[0125] As used herein, a heterologous promoter refers to a promoter that is not normally found in the wild-type organism or virus or that is at a different locus as compared to a wild-type organism or virus. A heterologous promoter is often not endogenous to a virus into which it is introduced, but has been obtained from another virus or prepared synthetically. A heterologous promoter can refer to a promoter from another virus in the same organism or another organism, including the same species or another species. A heterologous promoter, however, can be endogenous, but is a promoter that is altered in its sequence or occurs at a different locus (e.g., at a different location in the genome or on a plasmid). Thus, a heterologous promoter includes a promoter not present in the exact orientation or position as the counterpart promoter is found in a genome.

[0126] A synthetic promoter is a heterologous promoter that has a nucleotide sequence that is not found in nature. A synthetic promoter can be a nucleic acid molecule that has a synthetic sequence or a sequence derived from a native promoter or portion thereof. A synthetic promoter also can be a hybrid promoter composed of different elements derived from different native promoters.

[0127] As used herein, the term, “therapeutic gene product” or “therapeutic polypeptide” or “therapeutic agent” refers to any heterologous protein expressed by the therapeutic virus that ameliorates the symptoms of a disease or disorder or ameliorates the disease or disorder. Therapeutic agents include, but are not limited to, moieties that inhibit cell growth or promote cell death, that can be activated to inhibit cell growth or promote cell death, or that activate another agent to inhibit cell growth or promote cell death. Optionally, the therapeutic agent can exhibit or manifest additional properties, such as, properties that permit its use as an imaging agent, as described elsewhere herein. Exemplary therapeutic agents include, for example, cytokines, growth factors, photosensitizing agents, radionuclides, toxins, anti-metabolites, signaling modulators, anti-cancer antibiotics, anti-cancer antibodies, angiogenesis inhibitors, chemotherapeutic compounds or a combination thereof.

[0128] As used herein, a “reporter gene” is a gene that encodes a reporter molecule that can be detected when expressed by a virus provided herein or encodes a molecule that modulates expression of a detectable molecule, such as a nucleic acid molecule or a protein, or modulates an activity or event that is detectable. Hence reporter molecules include, nucleic acid molecules, such as expressed RNA molecules, and proteins.

[0129] As used herein, a detectable label or detectable moiety or diagnostic moiety (also imaging label, imaging agent, or imaging moiety) refers to an atom, molecule or composition, wherein the presence of the atom, molecule or composition can be directly or indirectly measured. Detectable labels can be used to image one or more of any of the viruses provided herein. Detectable labels include, for example, chemiluminescent moieties, bioluminescent moieties, fluorescent moieties, radionuclides, and metals. Methods for detecting labels are well known in the art. Such a label can be detected, for example, by visual inspection, by fluorescence spectroscopy, by reflectance measurement, by flow cytometry, by X-rays, by a variety of magnetic resonance methods such as magnetic resonance imaging (MRI) and magnetic resonance spectroscopy (MRS). Methods of detection also include any of a variety of tomographic methods including computed tomography (CT), computed axial tomography (CAT), electron beam computed tomography (EBCT), high resolution computed tomography (HRCT), hypocycloidal tomography, positron emission tomography (PET), single-photon emission computed tomography (SPECT), spiral computed tomography, and ultrasonic tomography. Direct detection of a detectable label refers to, for example, measurement of a physical phenomenon of the detectable label itself, such as energy or particle emission or absorption of the label itself, such as by X-ray or MRI. Indirect detection refers to measurement of a physical phenomenon of an atom, molecule or composition that binds directly or indirectly to the detectable label, such as energy or particle emission or absorption, of an atom, molecule or composition that binds directly or indirectly to the detectable label. In a non-limiting example of indirect detection, a detectable label can be biotin, which can be detected by binding to avidin. Non-labeled avidin can be administered systemically to block non-specific binding, followed by systemic administration of labeled avidin. Thus, included within the scope of a detectable label or detectable moiety is a bindable label or bindable moiety, which refers to an atom, molecule or composition, wherein the presence of the atom, molecule or composition can be detected as a result of the label or moiety binding to another atom, molecule or composition. Exemplary detectable labels include, for example, metals such as colloidal gold, iron, gadolinium, and gallium-67, fluorescent moieties, and radionuclides. Exemplary fluorescent moieties and radionuclides are provided elsewhere herein.

[0130] As used herein, LIVP GLV-1h68 is an LIVP virus that contains-ruc-gfp (a luciferase and green fluorescent protein fusion gene (see e.g. U.S. Pat. No. 5,976,796), beta-galactosidase (LacZ) and beta-glucuronidase (gusA) reporter genes inserted into the F14.5L, J2R (thymidine kinase) and A56R (hemagglutinin) loci, respectively. The genome of GLV-1h68 has a sequence of nucleotides set forth in SEQ ID NO:9, or a sequence of nucleotides that has at least 97%, 98% or 99% sequence identity to the sequence of nucleotides set forth in SEQ ID NO:9.

[0131] As used herein, a virus preparation or virus composition, for example an LIVP virus preparation, refers to a virus composition obtained by propagation of a virus strain, for example an LIVP virus strain, an LIVP clonal strain or a modified or recombinant virus strain, in vivo or in vitro in a culture system. For example, an LIVP virus preparation refers to a viral composition obtained by propagation of a virus strain in host cells, typically upon purification from the culture system using standard methods known in the art. A virus preparation generally is made up of a number of virus particles or virions. If desired, the number of virus particles in the sample or preparation can be determined using a plaque assay to calculate the number of plaque forming units per sample unit volume (pfu/mL), assuming that each plaque formed is representative of one infective virus particle. Each virus particle or virion in a preparation can have the same genomic sequence compared to other virus particles (i.e. the preparation is homogenous in sequence) or can have different genomic sequences (i.e. the preparation is heterogenous in sequence). It is understood to those of skill in the art that, in the absence of clonal isolation, heterogeneity or diversity in the genome of a virus can occur as the virus resproduces, such as by homologous recombination events that occur in the natural selection processes of virus strains (Plotkin & Orenstein (eds) “Recombinant Vaccinia Virus Vaccines” in Vaccines, 3^{rd} edition (1999)).

[0132] As used herein, a nanoparticle refers to a colloidal particle for delivery of a molecule or agent that is microscopic in size of between or about between 1 and 1000 nanometers (nm), such as 1 and 100 nm, and that behave as a whole unit in terms of transport and properties. Nanoparticles include those that are uniform in size. Nanoparticles include those that contain a targeting molecule attached to the outside.

[0133] As used herein, “targeting molecule” or “targeting ligand” refers to any molecular signal directing localization to specific cells, tissues or organs. Examples of targeting ligands include, but are not limited to, protein, polypeptide or portions thereof that bind to cell surface molecules, including, but not limited to, proteins, carbohydrates, lipids or other such moiety. For example, targeting ligands include proteins or portions thereof that bind to cell surface receptors or antibodies directed to antigens expressed selectively on a target cell. Targeting ligands include, but are not limited to growth factors, cytokines, adhesion molecules, neuropeptides, protein hormones and single-chain antibodies (scFv).

[0134] As used herein, a delivery vehicle for administration refers to a lipid-based or other polymer-based composition, such as liposome, micelle or reverse micelle, that associates with an agent, such as a virus provided herein, for delivery into a host subject.

[0135] As used herein, accumulation of a virus in a particular tissue refers to the distribution or colonization of the virus in particular tissues of a host organism after a time period following administration of the virus to the host, long enough for the virus to infect the host's organs or tissues. As one skilled in the art will recognize, the time period for infection of a virus will vary depending on the virus, the organ(s) or tissue(s), the immunocompetence of the host and dosage of the virus. Generally, accumulation can be determined at time points from about less than 1 day, about 1 day to about 2, 3, 4, 5, 6 or 7 days, about 1 week to about 2, 3 or 4 weeks, about 1 month to about 2, 3, 4, 5, 6 months or longer after infection with the virus. For purposes herein, the viruses preferentially accumulate in immunoprivileged tissue, such as inflamed tissue or tumor tissue, but are cleared from other tissues and organs, such as non-tumor tissues, in the host to the extent that toxicity of the virus is mild or tolerable and at most, not fatal.

[0136] As used herein, the term assessing or determining is intended to include quantitative and qualitative determination in the sense of obtaining an absolute value for the activity of a product, and also of obtaining an index, ratio, percentage, visual or other value indicative of the level of the activity. Assessment can be direct or indirect.

[0137] As used herein, activity refers to the in vitro or in vivo activities of a compound or virus provided herein. For example, in vivo activities refer to physiological responses that result following in vivo administration thereof (or of a composition or other mixture). Activity, thus, encompasses resulting therapeutic effects and pharmaceutical activity of such compounds, compositions and mixtures. Activities can be observed in in vitro and/or in vivo systems designed to test or use such activities.

[0138] As used herein, “anti-tumor activity” or “anti-tumorigenic” refers to virus strains that prevent or inhibit the formation or growth of tumors in vitro or in vivo in a subject. Anti-tumor activity can be determined by assessing a parameter or parameters indicative of anti-tumor activity.

[0139] As used herein, a “parameter indicative of anti-tumor activity or anti-tumorigenic activity” refers to a property mediated by a virus that is associated with anti-tumor activity. Parameters indicative of anti-tumor activity can be assessed in vitro or in vivo upon administration to a subject. Exemplary parameters indicative of anti-tumor activity include, but are not limited to, infectivity of tumor cells, accumulation of virus in tumor tissues, viral nucleic acid replication in tumor cells, virus production in tumor cells, viral gene expression in tumor cells, cytotoxicity of tumor cells, tumor cell selectivity, tumor cell type selectivity, decreased tumor size, increased tumor volume, decreased tumor weight, and initiation of specific and nonspecific anti-tumor immune responses. Assays that assess any of the above parameters or other anti-tumorigenic properties are known to one of skill in the art. Exemplary assays are described herein. Hence, a virus that exhibits any one or more of the above activities or properties exhibits anti-tumor activity.

[0140] As used herein, “toxicity” (also referred to as virulence or pathogenicity herein) with reference to a virus refers to the deleterious or toxic effects to a host upon administration of the virus. For an oncolytic virus, such as LIVP, the toxicity of a virus is associated with its accumulation in non-tumorous organs or tissues, which can impact the survival of the host or result in deleterious or toxic effects. Toxicity can be measured by assessing one or more parameters indicative of toxicity. These include accumulation in non-tumorous tissues and effects on viability or health of the subject to whom it has been administered, such as effects on weight.

[0141] As used herein, a “parameter indicative of toxicity” refers to a property mediated by a virus that is associated with its toxicity, virulence or pathogenicity. Parameters indicative of toxicity generally are assessed in vivo upon administration to a subject. Exemplary parameters indicative of toxicity include, but are not limited to, decreased survival of the subject, decreased body weight, fever, rash, allergy, fatigue, abdominal pain, induction of an immune response in the subject and pock formation. Assays or measures that assess any of the above parameters or other toxic properties known to one of skill in the art are described herein or are known to one of skill in the art. Hence, a virus that mediates any one or more of the above activities or properties in a host exhibits some degree of toxicity.

[0142] As used herein, nucleic acids include DNA, RNA and analogs thereof, including peptide nucleic acids (PNA) and mixtures thereof. Nucleic acids can be single or double-stranded. Nucleic acids can encode gene products, such as, for example, polypeptides, regulatory RNAs, microRNAs, siRNAs and functional RNAs.

[0143] As used herein, a peptide refers to a polypeptide that is greater than or equal to 2 amino acids in length, and less than or equal to 40 amino acids in length.

[0144] As used herein, the amino acids which occur in the various sequences of amino acids provided herein are identified according to their known, three-letter or one-letter abbreviations (Table 1). The nucleotides which occur in the various nucleic acid fragments are designated with the standard single-letter designations used routinely in the art.

[0145] As used herein, an “amino acid” is an organic compound containing an amino group and a carboxylic acid group. A polypeptide contains two or more amino acids. For purposes herein, amino acids include the twenty naturally-occurring amino acids, non-natural amino acids and amino acid analogs (i.e., amino acids wherein the α-carbon has a side chain).

[0146] As used herein, “amino acid residue” refers to an amino acid formed upon chemical digestion (hydrolysis) of a polypeptide at its peptide linkages. The amino acid residues described herein are presumed to be in the “L” isomeric form. Residues in the “D” isomeric form, which are so designated, can be substituted for any L-amino acid residue as long as the desired functional property is retained by the polypeptide. NH₂ refers to the free amino group present at the amino terminus of a polypeptide. COOH refers to the free carboxy group present at the carboxyl terminus of a polypeptide. In keeping with standard polypeptide nomenclature described in J. Biol. Chem. 243:3557-3559 (1968), and adopted 37 C.F.R. §§1.821-1.822, abbreviations for amino acid residues are shown in Table 1:

TABLE 2
Table of Correspondence

SYMBOL

| 1-Letter | 3-Letter | AMINO ACID |
|---|---|---|
| Y | Tyr | Tyrosine |
| G | Gly | Glycine |
| F | Phe | Phenylalanine |
| M | Met | Methionine |
| A | Ala | Alanine |
| S | Ser | Serine |
| I | Ile | Isoleucine |
| L | Leu | Leucine |
| T | Thr | Threonine |
| V | Val | Valine |
| P | Pro | Proline |
| K | Lys | Lysine |
| H | His | Histidine |
| Q | Gln | Glutamine |
| E | Glu | Glutamic acid |
| Z | Glx | Glu and/or Gln |
| W | Trp | Tryptophan |
| R | Arg | Arginine |
| D | Asp | Aspartic acid |
| N | Asn | Asparagine |
| B | Asx | Asn and/or Asp |
| C | Cys | Cysteine |
| X | Xaa | Unknown or other |

[0147] All amino acid residue sequences represented herein by formulae have a left to right orientation in the conventional direction of amino-terminus to carboxyl-terminus. In addition, the phrase “amino acid residue” is defined to include the amino acids listed in the Table of Correspondence (Table 2) and modified and unusual amino acids, such as those referred to in 37 C.F.R. §§1.821-1.822, and incorporated herein by reference. Furthermore, it should be noted that a dash at the beginning or end of an amino acid residue sequence indicates a peptide bond to a further sequence of one or more amino acid residues, to an amino-terminal group such as NH₂ or to a carboxyl-terminal group such as COOH.

[0148] As used herein, the “naturally occurring α-amino acids” are the residues of those 20 α-amino acids found in nature which are incorporated into protein by the specific recognition of the charged tRNA molecule with its cognate mRNA codon in humans. Non-naturally occurring amino acids thus include, for example, amino acids or analogs of amino acids other than the 20 naturally-occurring amino acids and include, but are not limited to, the D-isostereomers of amino acids. Exemplary non-natural amino acids are described herein and are known to those of skill in the art.

[0149] As used herein, a DNA construct is a single- or double-stranded, linear or circular DNA molecule that contains segments of DNA combined and juxtaposed in a manner not found in nature. DNA constructs exist as a result of human manipulation, and include clones and other copies of manipulated molecules.

[0150] As used herein, a DNA segment is a portion of a larger DNA molecule having specified attributes. For example, a DNA segment encoding a specified polypeptide is a portion of a longer DNA molecule, such as a plasmid or plasmid fragment, which, when read from the 5′ to 3′ direction, encodes the sequence of amino acids of the specified polypeptide.

[0151] As used herein, the term polynucleotide means a single- or double-stranded polymer of deoxyribonucleotides or ribonucleotide bases read from the 5′ to the 3′ end. Polynucleotides include RNA and DNA, and can be isolated from natural sources, synthesized in vitro, or prepared from a combination of natural and synthetic molecules. The length of a polynucleotide molecule is given herein in terms of nucleotides (abbreviated “nt”) or base pairs (abbreviated “bp”). The term nucleotides is used for single- and double-stranded molecules where the context permits. When the term is applied to double-stranded molecules it is used to denote overall length and will be understood to be equivalent to the term base pairs. It will be recognized by those skilled in the art that the two strands of a double-stranded polynucleotide can differ slightly in length and that the ends thereof can be staggered; thus all nucleotides within a double-stranded polynucleotide molecule may not be paired. Such unpaired ends will, in general, not exceed 20 nucleotides in length.

[0152] As used herein, recitation that nucleotides or amino acids “correspond to” nucleotides or amino acids in a disclosed sequence, such as set forth in the Sequence Listing, refers to nucleotides or amino acids identified upon alignment with the disclosed sequence to maximize identity using a standard alignment algorithm, such as the GAP algorithm. By aligning the sequences, one skilled in the art can identify corresponding residues, for example, using conserved and identical amino acid residues as guides. In general, to identify corresponding positions, the sequences of amino acids are aligned so that the highest order match is obtained (see, e.g.: Computational Molecular Biology, Lesk, A. M., ed., Oxford University Press, New York, 1988; Biocomputing: Informatics and Genome Projects, Smith, D. W., ed., Academic Press, New York, 1993; Computer Analysis of Sequence Data, Part I, Griffin, A. M., and Griffin, H. G., eds., Humana Press, New Jersey, 1994; Sequence Analysis in Molecular Biology, von Heinje, G., Academic Press, 1987; and Sequence Analysis Primer, Gribskov, M. and Devereux, J., eds., M Stockton Press, New York, 1991; Carillo et al. (1988) SIAM J Applied Math 48:1073).

[0153] As used herein, “sequence identity” refers to the number of identical or similar amino acids or nucleotide bases in a comparison between a test and a reference polypeptide or polynucleotide. Sequence identity can be determined by sequence alignment of nucleic acid or protein sequences to identify regions of similarity or identity. For purposes herein, sequence identity is generally determined by alignment to identify identical residues. The alignment can be local or global. Matches, mismatches and gaps can be identified between compared sequences. Gaps are null amino acids or nucleotides inserted between the residues of aligned sequences so that identical or similar characters are aligned. Generally, there can be internal and terminal gaps. Sequence identity can be determined by taking into account gaps as the number of identical residues/length of the shortest sequence×100. When using gap penalties, sequence identity can be determined with no penalty for end gaps (e.g. terminal gaps are not penalized). Alternatively, sequence identity can be determined without taking into account gaps as the number of identical positions/length of the total aligned sequence×100.

[0154] As used herein, a “global alignment” is an alignment that aligns two sequences from beginning to end, aligning each letter in each sequence only once. An alignment is produced, regardless of whether or not there is similarity or identity between the sequences. For example, 50% sequence identity based on “global alignment” means that in an alignment of the full sequence of two compared sequences each of 100 nucleotides in length, 50% of the residues are the same. It is understood that global alignment also can be used in determining sequence identity even when the length of the aligned sequences is not the same. The differences in the terminal ends of the sequences will be taken into account in determining sequence identity, unless the “no penalty for end gaps” is selected. Generally, a global alignment is used on sequences that share significant similarity over most of their length. Exemplary algorithms for performing global alignment include the Needleman-Wunsch algorithm (Needleman et al. J. Mol. Biol. 48: 443 (1970). Exemplary programs for performing global alignment are publicly available and include the Global Sequence Alignment Tool available at the National Center for Biotechnology Information (NCBI) website (ncbi.nlm.nih.gov/), and the program available at deepc2.psi.iastate.edu/aat/align/align.html.

[0155] As used herein, a “local alignment” is an alignment that aligns two sequences, but only aligns those portions of the sequences that share similarity or identity. Hence, a local alignment determines if sub-segments of one sequence are present in another sequence. If there is no similarity, no alignment will be returned. Local alignment algorithms include BLAST or Smith-Waterman algorithm (Adv. Appl. Math. 2: 482 (1981)). For example, 50% sequence identity based on “local alignment” means that in an alignment of the full sequence of two compared sequences of any length, a region of similarity or identity of 100 nucleotides in length has 50% of the residues that are the same in the region of similarity or identity.

[0156] For purposes herein, sequence identity can be determined by standard alignment algorithm programs used with default gap penalties established by each supplier. Default parameters for the GAP program can include: (1) a unary comparison matrix (containing a value of 1 for identities and 0 for non identities) and the weighted comparison matrix of Gribskov et al. Nucl. Acids Res. 14: 6745 (1986), as described by Schwartz and Dayhoff, eds., Atlas of Protein Sequence and Structure, National Biomedical Research Foundation, pp. 353-358 (1979); (2) a penalty of 3.0 for each gap and an additional 0.10 penalty for each symbol in each gap; and (3) no penalty for end gaps. Whether any two nucleic acid molecules have nucleotide sequences (or any two polypeptides have amino acid sequences) that are at least 80%, 85%, 90%, 95%, 96%, 97%, 98% or 99% “identical,” or other similar variations reciting a percent identity, can be determined using known computer algorithms based on local or global alignment (see e.g., wikipedia.org/wild/Sequence_alignment_software, providing links to dozens of known and publicly available alignment databases and programs). Generally, for purposes herein sequence identity is determined using computer algorithms based on global alignment, such as the Needleman-Wunsch Global Sequence Alignment tool available from NCBI/BLAST (blast.ncbi.nlm.nih.gov/Blast.cgi?CMD=Web&Page_TYPE=BlastHome); LAlign (William Pearson implementing the Huang and Miller algorithm (Adv. Appl. Math. (1991) 12:337-357)); and program from Xiaoqui Huang available at deepc2.psi.iastate.edu/aat/align/align.html. Generally, when comparing nucleotide sequences herein, an alignment with no penalty for end gaps (e.g. terminal gaps are not penalized) is used.

[0157] Therefore, as used herein, the term “identity” represents a comparison or alignment between a test and a reference polypeptide or polynucleotide. In one non-limiting example, “at least 90% identical to” refers to percent identities from 90 to 100% relative to the reference polypeptide or polynucleotide. Identity at a level of 90% or more is indicative of the fact that, assuming for exemplification purposes a test and reference polypeptide or polynucleotide length of 100 amino acids or nucleotides are compared, no more than 10% (i.e., 10 out of 100) of amino acids or nucleotides in the test polypeptide or polynucleotide differs from that of the reference polypeptides. Similar comparisons can be made between a test and reference polynucleotides. Such differences can be represented as point mutations randomly distributed over the entire length of an amino acid sequence or they can be clustered in one or more locations of varying length up to the maximum allowable, e.g., 10/100 amino acid difference (approximately 90% identity). Differences are defined as nucleic acid or amino acid substitutions, insertions or deletions. Depending on the length of the compared sequences, at the level of homologies or identities above about 85-90%, the result can be independent of the program and gap parameters set; such high levels of identity can be assessed readily, often without relying on software.

[0158] As used herein, substantially pure means sufficiently homogeneous to appear free of readily detectable impurities as determined by standard methods of analysis, such as thin layer chromatography (TLC), gel electrophoresis and high performance liquid chromatography (HPLC), used by those of skill in the art to assess such purity, or sufficiently pure such that further purification would not detectably alter the physical and chemical properties, such as enzymatic and biological activities, of the substance. Methods for purification of the compounds to produce substantially chemically pure compounds are known to those of skill in the art. A substantially chemically pure compound can, however, be a mixture of stereoisomers or isomers. In such instances, further purification might increase the specific activity of the compound.

[0159] As used herein, the terms immunoprivileged cells and immunoprivileged tissues refer to cells and tissues, such as solid tumors, which are sequestered from the immune system. Generally, administration of a virus to a subject elicits an immune response that clears the virus from the subject. Immunoprivileged sites, however, are shielded or sequestered from the immune response, permitting the virus to survive and generally to replicate. Immunoprivileged tissues include proliferating tissues, such as tumor tissues and other tissues and cells involved in other proliferative disorders, wounds and other tissues involved in inflammatory responses.

[0160] As used herein, a wound or lesion refers to any damage to any tissue in a living organism. The tissue can be an internal tissue, such as the stomach lining or a bone, or an external tissue, such as the skin. As such, a wound or lesion can include, but is not limited to, a gastrointestinal tract ulcer, a broken bone, a neoplasia, and cut or abraded skin. A wound or lesion can be in a soft tissue, such as the spleen, or in a hard tissue, such as bone. The wound or lesion can have been caused by any agent, including traumatic injury, infection or surgical intervention.

[0161] As used herein, a skin lesion refers to a lesion on the surface of the skin. The skin lesion can be have been caused by a traumatic injury, infection, surgical intervention or an environmental factor. Exemplary of skin lesions include, but are not limited to, precancerous lesion (e.g. actinic keratosis of the skin), a cancerous lesion (e.g. skin cancer), a traumatic wound (e.g. burn or scar) or a post-surgical wound (e.g. surgically resected tumor). In particular, the lesion is a skin cancer lesion such as basal cell carcinoma or squamous cell carcinoma.

[0162] As used herein, a tumor, also known as a neoplasm, is an abnormal mass of tissue that results when cells proliferate at an abnormally high rate. Tumors can show partial or total lack of structural organization and functional coordination with normal tissue. Tumors can be benign (not cancerous), or malignant (cancerous). As used herein, a tumor is intended to encompass hematopoietic tumors as well as solid tumors.

[0163] Malignant tumors can be broadly classified into three major types. Carcinomas are malignant tumors arising from epithelial structures (e.g. breast, prostate, lung, colon, pancreas). Sarcomas are malignant tumors that originate from connective tissues, or mesenchymal cells, such as muscle, cartilage, fat or bone. Leukemias and lymphomas are malignant tumors affecting hematopoietic structures (structures pertaining to the formation of blood cells) including components of the immune system. Other malignant tumors include, but are not limited to, tumors of the nervous system (e.g. neurofibromatomas), germ cell tumors, and blastic tumors.

[0164] As used herein, a resected tumor refers to a tumor in which a significant portion of the tumor has been excised. The excision can be effected by surgery (i.e. surgically resected tumor). The resection can be partial or complete.

[0165] As used herein, a disease or disorder refers to a pathological condition in an organism resulting from, for example, infection or genetic defect, and characterized by identifiable symptoms. An exemplary disease as described herein is a neoplastic disease, such as cancer.

[0166] As used herein, proliferative disorders or hyperproliferative disorders include any disorders involving abnormal proliferation of cells. Such disorders include, but are not limited to, neoplastic diseases, inflammatory responses and disorders, e.g. including wound healing responses, psoriasis, restenosis, macular degeneration, diabetic retinopathies, endometriosis, benign prostatic hypertrophy, hypertrophic scarring, cirrhosis, proliferative vitreoretinopathy, retinopathy of prematurity, and immunoproliferative diseases or disorders, e.g. inflammatory bowel disease, rheumatoid arthritis, systemic lupus erythematosus (SLE) and vascular hyperproliferation secondary to retinal hypoxia or vasculitis.

[0167] As used herein, neoplastic disease refers to any disorder involving cancer, including tumor development, growth, metastasis and progression.

[0168] As used herein, cancer is a term for diseases caused by or characterized by any type of malignant tumor, including metastatic cancers, lymphatic tumors, and blood cancers. Exemplary cancers include, but are not limited to, acute lymphoblastic leukemia, acute lymphoblastic leukemia, acute myeloid leukemia, acute promyelocytic leukemia, adenocarcinoma, adenoma, adrenal cancer, adrenocortical carcinoma, AIDS-related cancer, AIDS-related lymphoma, anal cancer, appendix cancer, astrocytoma, basal cell carcinoma, bile duct cancer, bladder cancer, bone cancer, osteosarcoma/malignant fibrous histiocytoma, brainstem glioma, brain cancer, carcinoma, cerebellar astrocytoma, cerebral astrocytoma/malignant glioma, ependymoma, medulloblastoma, supratentorial primitive neuroectodermal tumor, visual pathway or hypothalamic glioma, breast cancer, bronchial adenoma/carcinoid, Burkitt lymphoma, carcinoid tumor, carcinoma, central nervous system lymphoma, cervical cancer, chronic lymphocytic leukemia, chronic myelogenous leukemia, chronic myeloproliferative disorder, colon cancer, cutaneous T-cell lymphoma, desmoplastic small round cell tumor, endometrial cancer, ependymoma, epidermoid carcinoma, esophageal cancer, Ewing's sarcoma, extracranial germ cell tumor, extragonadal germ cell tumor, extrahepatic bile duct cancer, eye cancer/intraocular melanoma, eye cancer/retinoblastoma, gallbladder cancer, gallstone tumor, gastric/stomach cancer, gastrointestinal carcinoid tumor, gastrointestinal stromal tumor, giant cell tumor, glioblastoma multiforme, glioma, hairy-cell tumor, head and neck cancer, heart cancer, hepatocellular/liver cancer, Hodgkin lymphoma, hyperplasia, hyperplastic corneal nerve tumor, in situ carcinoma, hypopharyngeal cancer, intestinal ganglioneuroma, islet cell tumor, Kaposi's sarcoma, kidney/renal cell cancer, laryngeal cancer, leiomyoma tumor, lip and oral cavity cancer, liposarcoma, liver cancer, non-small cell lung cancer, small cell lung cancer, lymphomas, macroglobulinemia, malignant carcinoid, malignant fibrous histiocytoma of bone, malignant hypercalcemia, malignant melanomas, marfanoid habitus tumor, medullary carcinoma, melanoma, merkel cell carcinoma, mesothelioma, metastatic skin carcinoma, metastatic squamous neck cancer, mouth cancer, mucosal neuromas, multiple myeloma, mycosis fungoides, myelodysplastic syndrome, myeloma, myeloproliferative disorder, nasal cavity and paranasal sinus cancer, nasopharyngeal carcinoma, neck cancer, neural tissue cancer, neuroblastoma, oral cancer, oropharyngeal cancer, osteosarcoma, ovarian cancer, ovarian epithelial tumor, ovarian germ cell tumor, pancreatic cancer, parathyroid cancer, penile cancer, pharyngeal cancer, pheochromocytoma, pineal astrocytoma, pineal germinoma, pineoblastoma, pituitary adenoma, pleuropulmonary blastoma, polycythemia vera, primary brain tumor, prostate cancer, rectal cancer, renal cell tumor, reticulum cell sarcoma, retinoblastoma, rhabdomyosarcoma, salivary gland cancer, seminoma, Sezary syndrome, skin cancer, small intestine cancer, soft tissue sarcoma, squamous cell carcinoma, squamous neck carcinoma, stomach cancer, supratentorial primitive neuroectodermal tumor, testicular cancer, throat cancer, thymoma, thyroid cancer, topical skin lesion, trophoblastic tumor, urethral cancer, uterine/endometrial cancer, uterine sarcoma, vaginal cancer, vulvar cancer, Waldenström's macroglobulinemia or Wilm's tumor. Exemplary cancers commonly diagnosed in humans include, but are not limited to, cancers of the bladder, brain, breast, bone marrow, cervix, colon/rectum, kidney, liver, lung/bronchus, ovary, pancreas, prostate, skin, stomach, thyroid, or uterus. Exemplary cancers commonly diagnosed in dogs, cats, and other pets include, but are not limited to, lymphosarcoma, osteosarcoma, mammary tumors, mastocytoma, brain tumor, melanoma, adenosquamous carcinoma, carcinoid lung tumor, bronchial gland tumor, bronchiolar adenocarcinoma, fibroma, myxochondroma, pulmonary sarcoma, neurosarcoma, osteoma, papilloma, retinoblastoma, Ewing's sarcoma, Wilm's tumor, Burkitt's lymphoma, microglioma, neuroblastoma, osteoclastoma, oral neoplasia, fibrosarcoma, osteosarcoma and rhabdomyosarcoma, genital squamous cell carcinoma, transmissible venereal tumor, testicular tumor, seminoma, Sertoli cell tumor, hemangiopericytoma, histiocytoma, chloroma (e.g., granulocytic sarcoma), corneal papilloma, corneal squamous cell carcinoma, hemangiosarcoma, pleural mesothelioma, basal cell tumor, thymoma, stomach tumor, adrenal gland carcinoma, oral papillomatosis, hemangioendothelioma and cystadenoma, follicular lymphoma, intestinal lymphosarcoma, fibrosarcoma and pulmonary squamous cell carcinoma. Exemplary cancers diagnosed in rodents, such as a ferret, include, but are not limited to, insulinoma, lymphoma, sarcoma, neuroma, pancreatic islet cell tumor, gastric MALT lymphoma and gastric adenocarcinoma. Exemplary neoplasias affecting agricultural livestock include, but are not limited to, leukemia, hemangiopericytoma and bovine ocular neoplasia (in cattle); preputial fibrosarcoma, ulcerative squamous cell carcinoma, preputial carcinoma, connective tissue neoplasia and mastocytoma (in horses); hepatocellular carcinoma (in swine); lymphoma and pulmonary adenomatosis (in sheep); pulmonary sarcoma, lymphoma, Rous sarcoma, reticulo-endotheliosis, fibrosarcoma, nephroblastoma, B-cell lymphoma and lymphoid leukosis (in avian species); retinoblastoma, hepatic neoplasia, lymphosarcoma (lymphoblastic lymphoma), plasmacytoid leukemia and swimbladder sarcoma (in fish), caseous lymphadenitis (CLA): chronic, infectious, contagious disease of sheep and goats caused by the bacterium Corynebacterium pseudotuberculosis, and contagious lung tumor of sheep caused by jaagsiekte.

[0169] As used herein, a “metastasis” refers to the spread of cancer from one part of the body to another. For example, in the metastatic process, malignant cells can spread from the site of the primary tumor in which the malignant cells arose and move into lymphatic and blood vessels, which transport the cells to normal tissues elsewhere in an organism where the cells continue to proliferate. A tumor formed by cells that have spread by metastasis is called a “metastatic tumor,” a “secondary tumor” or a “metastasis.”

[0170] As used herein, an anticancer agent or compound (used interchangeably with “antitumor or antineoplastic agent”) refers to any agents, or compounds, used in anticancer treatment. These include any agents, when used alone or in combination with other compounds or treatments, that can alleviate, reduce, ameliorate, prevent, or place or maintain in a state of remission of clinical symptoms or diagnostic markers associated with neoplastic disease, tumors and cancer, and can be used in methods, combinations and compositions provided herein. Anticancer agents include antimetastatic agents. Exemplary anticancer agents include, but are not limited to, chemotherapeutic compounds (e.g., toxins, alkylating agents, nitrosoureas, anticancer antibiotics, antimetabolites, antimitotics, topoisomerase inhibitors), cytokines, growth factors, hormones, photosensitizing agents, radionuclides, signaling modulators, anticancer antibodies, anticancer oligopeptides, anticancer oligonucleotides (e.g., antisense RNA and siRNA), angiogenesis inhibitors, radiation therapy, or a combination thereof. Exemplary chemotherapeutic compounds include, but are not limited to, Ara-C, cisplatin, carboplatin, paclitaxel, doxorubicin, gemcitabine, camptothecin, irinotecan, cyclophosphamide, 6-mercaptopurine, vincristine, 5-fluorouracil, and methotrexate. As used herein, reference to an anticancer or chemotherapeutic agent includes combinations or a plurality of anticancer or chemotherapeutic agents unless otherwise indicated.

[0171] As used herein, a “chemosensitizing agent” is an agent which modulates, attenuates, reverses, or affects a cell's or organism's resistance to a given chemotherapeutic drug or compound. The terms “modulator”, “modulating agent”, “attenuator”, “attenuating agent”, or “chemosensitizer” can be used interchangeably to mean “chemosensitizing agent.” In some examples, a chemosensitizing agent can also be a chemotherapeutic agent. Examples of chemosensitizing agents include, but are not limited to, radiation, calcium channel blockers (e.g., verapamil), calmodulin inhibitors (e.g., trifluoperazine), indole alkaloids (e.g., reserpine), quinolines (e.g., quinine), lysosomotropic agents (e.g., chloroquine), steroids (e.g., progesterone), triparanol analogs (e.g., tamoxifen), detergents (e.g., Cremophor EL), texaphyrins, and cyclic antibiotics (e.g., cyclosporine).

[0172] As used herein, a subject includes any organism, including an animal for whom diagnosis, screening, monitoring or treatment is contemplated. Animals include mammals such as primates and domesticated animals. An exemplary primate is human. A patient refers to a subject, such as a mammal, primate, human, or livestock subject afflicted with a disease condition or for which a disease condition is to be determined or risk of a disease condition is to be determined.

[0173] As used herein, a patient refers to a human subject exhibiting symptoms of a disease or disorder.

[0174] As used herein, treatment of a subject that has a condition, disorder or disease means any manner of treatment in which the symptoms of the condition, disorder or disease are ameliorated or otherwise beneficially altered. Treatment encompasses any pharmaceutical use of the viruses described and provided herein.

[0175] As used herein, amelioration of the symptoms of a particular disease or disorder by a treatment, such as by administration of a pharmaceutical composition or other therapeutic, refers to any lessening, whether permanent or temporary, lasting or transient, of the symptoms that can be attributed to or associated with administration of the composition or therapeutic.

[0176] As used herein, treatment of a wound refers to any manner of treatment in which the signs or symptoms of having a wound are ameliorated or otherwise beneficially altered. Typically, treatment encompasses alleviation of the wound, shrinkage of the wound, reduction in the size of the wound or other similar result that is associated with wound healing.

[0177] As used herein, treatment of a subject that has a neoplastic disease, including a tumor or metastasis, means any manner of treatment in which the symptoms of having the neoplastic disease are ameliorated or otherwise beneficially altered. Typically, treatment of a tumor or metastasis in a subject encompasses any manner of treatment that results in slowing of tumor growth, lysis of tumor cells, reduction in the size of the tumor, prevention of new tumor growth, or prevention of metastasis of a primary tumor, including inhibition vascularization of the tumor, tumor cell division, tumor cell migration or degradation of the basement membrane or extracellular matrix.

[0178] As used herein, therapeutic effect means an effect resulting from treatment of a subject that alters, typically improves or ameliorates the symptoms of a disease or condition or that cures a disease or condition. A therapeutically effective amount refers to the amount of a composition, molecule or compound which results in a therapeutic effect following administration to a subject.

[0179] As used herein, amelioration or alleviation of the symptoms of a particular disorder, such as by administration of a particular pharmaceutical composition, refers to any lessening, whether permanent or temporary, lasting or transient that can be attributed to or associated with administration of the composition.

[0180] As used herein, efficacy means that upon administration of a virus or virus composition, the virus will colonize proliferating or immunoprivileged cells, such as tumor cells, and replicate. Colonization and replication in tumor cells is indicative that the treatment is or will be an effective treatment.

[0181] As used herein, effective treatment with a virus is one that can increase survival compared to the absence of treatment therewith. For example, a virus is an effective treatment if it stabilizes disease, causes tumor regression, decreases severity of disease or slows down or reduces metastasizing of the tumor.

[0182] As used herein, a composition refers to any mixture. It can be a solution, suspension, liquid, gel, powder, paste, aqueous, non-aqueous or any combination thereof.

[0183] As used herein, a formulation refers to a composition containing at least one active pharmaceutical or therapeutic agent and one or more excipients.

[0184] As used herein, a co-formulation refers to a composition containing two or more active or pharmaceutical or therapeutic agents and one or more excipients.

[0185] As used herein, a combination refers to any association between or among two or more items. The combination can be two or more separate items, such as two compositions or two collections, can be a mixture thereof, such as a single mixture of the two or more items, or any variation thereof. The elements of a combination are generally functionally associated or related.

[0186] As used herein, direct administration refers to administration of a composition without dilution.

[0187] As used herein, a kit is a packaged combination, optionally, including instructions for use of the combination and/or other reactions and components for such use.

[0188] As used herein, an “article of manufacture” is a product that is made and sold. As used throughout this application, the term is intended to encompass articles containing a vaccinia virus and protein polymer (e.g. SELP) contained in the same or separate articles of packaging.

[0189] As used herein, a device refers to a thing made or adapted for a particular task. Exemplary of devices herein are devices that cover or coat or are capable of contacting the epidermis or surface of the skin. Examples of such devices include, but are not limited to, a wrap, bandage, bind, dress, suture, patch, gauze or dressing.

[0190] As used herein, the singular forms “a,” “an” and “the” include plural referents unless the context clearly dictates otherwise.

[0191] As used herein, ranges and amounts can be expressed as “about” or “approximately” a particular value or range. “About” or “approximately” also includes the exact amount. Hence, “about 5 milliliters” means “about 5 milliliters” and also “5 milliliters.” Generally “about” includes an amount that would be expected to be within experimental error.

[0192] As used herein, “about the same” means within an amount that one of skill in the art would consider to be the same or to be within an acceptable range of error. For example, typically, for pharmaceutical compositions, within at least 1%, 2%, 3%, 4%, 5% or 10% is considered about the same. Such amount can vary depending upon the tolerance for variation in the particular composition by subjects.

[0193] As used herein, “optional” or “optionally” means that the subsequently described event or circumstance does or does not occur, and that the description includes instances where said event or circumstance occurs and instances where it does not.

[0194] As used herein, the abbreviations for any protective groups, amino acids and other compounds, are, unless indicated otherwise, in accord with their common usage, recognized abbreviations, or the IUPAC-IUB Commission on Biochemical Nomenclature (see, (1972) Biochem. 11:1726).

[0195] For clarity of disclosure, and not by way of limitation, the detailed description is divided into the subsections that follow.

### B. VIRUS POLYMER COMPOSITIONS AND METHODS OF VIRAL DELIVERY AND TREATMENT

[0196] Provided herein are compositions containing an oncolytic vaccinia virus in protein polymer (VV-protein polymer), such as in SELP polymer (e.g. VV-SELP), and in particular LIVP-SELP compositions. The VV-protein polymer or VV-SELP compositions, for example LIVP-SELP compositions, are stable at physiologic temperatures (e.g. 34° C. to 37° C.) for at least one week and up to four weeks or more, and are stable at room temperature for even longer. By virtue of the increased stability of the oncolytic virus, the stable VV-SELP compositions can be used for topical delivery to mucosal surfaces for the treatment of wounds, tumors or resected tumors or other hyperproliferative lesions. In addition, the VV-SELP compositions, including LIVP-SELP compositions, also can be used in methods of administration of virus, for example by intravenous administration, to increase virus delivery to proliferating cells or tissues, including immunoprivileged cells and tissues, for examples tumors, wounds or other proliferating cells or tissues.

[0197] 1. Vaccinia Viruses

[0198] Vaccinia viruses are oncolytic viruses that possess a variety of features that make them particularly suitable for use in wound and cancer gene therapy. For example, vaccinia is a cytoplasmic virus, thus, it does not insert its genome into the host genome during its life cycle. Unlike many other viruses that require the host's transcription machinery, vaccinia virus can support its own gene expression in the host cell cytoplasm using enzymes encoded in the viral genome. Vaccinia viruses also have a broad host and cell type range. In particular vaccinia viruses can accumulate in immunoprivileged cells or immunoprivileged tissues, including tumors and/or metastases, and also including wounded tissues and cells. Yet, unlike other oncolytic viruses, vaccinia virus can typically be cleared from the subject to whom the viruses are administered by activity of the subject's immune system, and hence are less toxic than other viruses such as adenoviruses. Thus, while the viruses can typically be cleared from the subject to whom the viruses are administered by activity of the subject's immune system, viruses can nevertheless accumulate, survive and proliferate in immunoprivileged cells and tissues such as tumors because such immunoprivileged areas are sequestered from the host's immune system.

[0199] Vaccinia viruses also can be easily modified by insertion of heterologous genes. This can result in the attenuation of the virus and/or permit delivery of therapeutic proteins. For example, the vaccinia virus genome has a large carrying capacity for foreign genes, where up to 25 kb of exogenous DNA fragments (approximately 12% of the vaccinia genome size) can be inserted. The genomes of several of the vaccinia strains have been completely sequenced, and many essential and nonessential genes identified. Due to high sequence homology among different strains, genomic information from one vaccinia strain can be used for designing and generating modified viruses in other strains. Finally, the techniques for production of modified vaccinia strains by genetic engineering are well established (Moss, Curr. Opin. Genet. Dev. 3 (1993), 86-90; Broder and Earl, Mol. Biotechnol. 13 (1999), 223-245; Timiryasova et al., Biotechniques 31 (2001), 534-540).

[0200] Various vaccina viruses have been demonstrated to exhibit antitumor activities. In one study, for example, nude mice bearing nonmetastatic colon adenocarcinoma cells were systemically injected with a WR strain of vaccinia virus modified by having a vaccinia growth factor deletion and an enhanced green fluorescence protein inserted into the thymidine kinase locus. The virus was observed to have antitumor effect, including one complete response, despite a lack of exogenous therapeutic genes in the modified virus (McCart et al. (2001) Cancer Res 1:8751-8757). In another study, vaccinia melanoma oncolysate (VMO) was injected into sites near melanoma positive lymph nodes in a Phase III clinical trial of melanoma patients. As a control, New York City Board of Health strain vaccinia virus (VV) was administered to melanoma patients. The melanoma patients treated with VMO had a survival rate better than that for untreated patients, but similar to patients treated with the VV control (Kim et al. (2001) Surgical Oncol 10:53-59). LIVP strains of vaccinia virus also have been used for the diagnosis and therapy of tumors, and for the treatment of wounded and inflamed tissues and cells (see e.g. Zhang et al. (2007) Surgery, 142:976-983; Lin et al. (2008) J. Clin. Endocrinol., Metab., 93:4403-7; Kelly et al. (2008) Hum gene There., 19:774-782; Yu et al. (2009) Mol Cancer Ther., 8:141-151; Yu et al. (2009) Mol Cancer, 8:45; U.S. Pat. No. 7,588,767; U.S. Pat. No. 8,052,968; and U.S. Published application No. US20040234455). For example, when intravenously administered, LIVP strains have been demonstrated to accumulate in internal tumors at various loci in vivo, and have been demonstrated to effectively treat human tumors of various tissue origin, including, but not limited to, breast tumors, thyroid tumors, pancreatic tumors, metastatic tumors of pleural mesothelioma, squamous cell carcinoma, lung carcinoma and ovarian tumors. LIVP strains of vaccinia, including attenuated forms thereof, exhibit less toxicity than WR strains of vaccinia virus, and results in increased and longer survival of treated tumor-bearing animal models (see e.g. U.S. Published Patent Appl. No. US20110293527).

[0201] 2. Delivery of Vaccinia Viruses

[0202] For the treatment of immunoprivileged cells or immunoprivileged tissues, including tumors and/or metastases, and wounded tissues and cells, vaccinia viruses are typically administered by direct intratumoral injection, intraperitoneal injection or by intravenous injection. In particular, due to the lower toxicity of vaccinia virus compared to other oncolytic viruses, such as adenovirus, vaccinia virus strains can be administered intravenously. This is advantageous, since intravenous administration permits a bolus of virus to be injected into the bloodstream for rapid dissemination throughout the subject to the circulatory system. The virus is able to access and accumulate in the immunoprivileged cells or tissues, including to tumor metastases. Since the treatment is not localized to direct injection of a tumor or wounded or inflamed tissue, intravenous administration generally is a more potent route of administration than other injection routes.

[0203] 3. SELP Compositions

[0204] Silk-elastinlike polymers (SELPs) are hydrogel polymers that exhibit pore size and gelation properties in vivo that permits the distribution of and controls release of bioactive agents contained therein. SELPs also have been used for the intratumoral delivery of adenovirus (see e.g. Gustafson et al. (2010) Mol Pharm, 7:1050-1056). Unlike other polymer delivery systems that alter surface functionalization of virus, SELPs do not interfere with viral cell transduction.

[0205] For delivery of virus, SELPs have been used to limit the systemic exposure of the virus to the immune system (Gustafson et al. (2010) Mol Pharm, 7:1050-1056). For example, Gustafason et al. shows that a problem even with direct intratumoral injection of adenvovirus, is that there is still some unwanted systemic exposure. The study demonstrated that administration of the virus in a SELP matrix decreased systemic exposure of virus when delivered intratumorally, controlled release of the virus at the injection site, and thereby led to localized, prolonged and increased overall gene expression levels at the site of interest.

[0206] Unlike other viruses that are limited by systemic delivery, as noted above vaccinia virus can be delivered systemically. While SELPs have been previously used to limit systemic exposure of virus, it is found herein that SELPs can increase systemic viral delivery upon intravenous administration. This is advantageous for delivery of vaccinia virus, which is a virus that exhibits little toxicity when delivered systemically. For example, while intravenous delivery of vaccinia virus, such as LIVP strains, is effective for treating tumors, it is found herein that intravenous delivery of vaccinia virus can be improved in the presence of SELP. As shown herein, this results in increased delivery of the virus to tumors, including increased tumor cell infectivity and replication efficiency. As shown herein, this result is not achieved by administration of VV-SELP by intratumoral direct injection. The VV-SELP compositions, such as LIVP-SELP compositions, can be delivered intravenously to effect a more potent and robust treatment of immunoprivileged cells or immunoprivileged tissues, including tumors and/or metastases, and wounded tissues and cells, than achieved by intravenous delivery of virus alone. Accordingly, VV-SELP compositions formulated for intravenous administration can be administered at lower dosages and/or at a lesser frequency than virus alone, which can further limit any toxicity issues of the already safe viruses. The increased delivery and infectivity of target cells and tissues achieved by SELPs also can result in an increased survival or therapeutic efficacy than an equivalent dosage of virus alone.

[0207] Besides exhibiting properties that increase delivery and infectivity of virus upon systemic delivery, it is also found herein that SELPs increase the stability of virus. For example, it is shown herein that an exemplary vaccinia virus LIVP strain exhibits a rapid decline of infectious particles over time at physiologic temperature of 37° C. For example, exposure of the virus to 37° C. resulted in an almost 70% decrease in the number of infectious plaque forming units within 12 hours, to less than 1% within one week, and no detectable infectious particles present after more than one week. In contrast, exposure of the same LIVP strain in a SELP matrix to 37° C. dramatically increased stability of the virus, such that a significant percentage of viral particles were viable at one week and remained viable for up to 4 weeks at 37° C.

[0208] The increased stability of vaccinia virus afforded by SELP has applications for stable storage of vaccinia virus (e.g. a LIVP) in polymer (e.g. SELP) compositions. In addition, increased stability of vaccinia virus in polymer also permits particular delivery applications that are not achievable with non-polymer conjugated virus. For example, stable VV-SELP compositions can be used for topical applications. This includes, for example, topical delivery to treat wounds, a hyperproliferative lesion, such as a carcinoma, or a resected tumors. The VV-SELP compositions can be applied to wounds, lesions or tumors directly or can be applied in a bandage, films, strips or patches.

[0209] For example, one of the problems with intratumoral or direct injection of virus is the difficulty of the virus to adequately distribute throughout the tumor mass. It is found herein that topical delivery of virus to a tumor bed immediately following surgical resection is a method to achieve delivery of virus to low, rather than high, volume tumors. This can overcome problems associated with inadequate distribution of virus in tumors. For example, it is demonstrated herein that intraoperative, direct application of VV-SELP to a resected tumor that represents a low volume residual disease optimizes viral delivery and tumor penetration. Thus, such a method can be used in conjunction with methods where a tumor is removed by surgical resection removing the majority of disease, but where residual disease remains.

[0210] The following sections describe exemplary vaccinia viruses (e.g. LIVP and strains thereof) and protein polymers (e.g. SELPs) for preparation of the VV-polymer compositions provided herein, in particular VV-SELP compositions. Exemplary articles of manufacture and methods using the VV-polymer, such as VV-SELP, compositions also are described.

### C. VACCINIA VIRUSES AND LIVP

[0211] Provided herein are compositions containing a vaccinia virus in a protein polymer. Vaccinia is a cytoplasmic virus, thus, it does not insert its genome into the host genome during its life cycle. Vaccinia virus has a linear, double-stranded DNA genome of approximately 180,000 base pairs in length that is made up of a single continuous polynucleotide chain (Baroudy et al. (1982) Cell, 28:315-324). The structure is due to the presence of 10,000 base pair inverted terminal repeats (ITRs). The ITRs are involved in genome replication. Genome replication is believed to involve self-priming, leading to the formation of high molecular weight concatemers (isolated from infected cells) which are subsequently cleaved and repaired to make virus genomes. See, e.g., Traktman, P., Chapter 27, Poxvirus DNA Replication, pp. 775-798, in DNA Replication in Eukaryotic Cells, Cold Spring Harbor Laboratory Press (1996). The genome encodes for approximately 250 genes. In general, the nonsegmented, noninfectious genome is arranged such that centrally located genes are essential for virus replication (and are thus conserved), while genes near the two termini effect more peripheral functions such as host range and virulence. Vaccinia viruses practice differential gene expression by utilizing open reading frames (ORFs) arranged in sets that, as a general principle, do not overlap.

[0212] Vaccinia virus possesses a variety of features for use in cancer gene therapy and vaccination including broad host and cell type range, and low toxicity. For example, while most oncolytic viruses are natural pathogens, vaccinia virus has a unique history in its widespread application as a smallpox vaccine that has resulted in an established track record of safety in humans. Toxicities related to vaccinia administration occur in less than 0.1% of cases, and can be effectively addressed with immunoglobulin administration. In addition, vaccinia virus possesses a large carrying capacity for foreign genes (up to 25 kb of exogenous DNA fragments (approximately 12% of the vaccinia genome size) can be inserted into the vaccinia genome), high sequence homology among different strains for designing and generating modified viruses in other strains, and techniques for production of modified vaccinia strains by genetic engineering are well established (Moss (1993) Curr. Opin. Genet. Dev. 3: 86-90; Broder and Earl (1999) Mol. Biotechnol. 13: 223-245; Timiryasova et al. (2001) Biotechniques 31: 534-540). Vaccinia virus strains have been shown to specifically colonize solid tumors, while not infecting other organs (see, e.g., Zhang et al. (2007) Cancer Res 67:10038-10046; Yu et al., (2004) Nat Biotech 22:313-320; Heo et al., (2011) Mol Ther 19:1170-1179; Liu et al. (2008) Mol Ther 16:1637-1642; Park et al., (2008) Lancet Oncol, 9:533-542). A variety of vaccinia virus strains are available for the compositions herein, including Western Reserve (WR) (SEQ ID NO: 10), Copenhagen (SEQ ID NO: 11), Tashkent, Tian Tan, Lister, Wyeth, IHD-J, and IHD-W, Brighton, Ankara, MVA, Dairen I, LIPV, LC16M8, LC16MO, LIVP, WR 65-16, Connaught, New York City Board of Health. Exemplary of known viruses are set forth in Table 3A. Exemplary of vaccinia viruses for use in the methods provided herein include, but are not limited to, Lister strain or LIVP strain of vaccinia viruses or modified forms thereof. LIVP exhibits less virulence than the WR strain. Also, for example, a recombinant derivative of LIVP, designated GLV-1h68 (set forth in SEQ ID NO:9; GenBank Acc. No. EU410304) and GLV-1h64 (set forth in SEQ ID NO:18) exhibit tumor targeting properties and an improved safety profile compared to its parental LIVP strain (set forth in SEQ ID NO:1) and the WR strain (Zhang et al. (2009) Mol. Genet. Genomics, 282:417-435).

TABLE 3A

| | | Reference (e.g. GenBank |
|---|---|---|
| Name | Abbreviations | Accession No.) |
| Vaccinia virus strain Western | WR | AY243312 |
| Reserve | | |
| Vaccinia virus strain | COP | M35027 |
| Copenhagen | | |
| Vaccinia Lister major strain | LIST | AY678276 |
| Vaccinia Lister isolate | LC | AY678277 |
| LC16MO | | |
| Vaccinia Lister clone | VACV107 | DQ121394 |
| VACV107 | | |
| Vaccinia virus strain | ACAM | AY313847 |
| ACAM2000 | | |
| Vaccinia virus strain DUKE | DUKE | DQ439815; Li et al. |
| | | (2006) Virology J, 3: 88 |
| Vaccinia virus strain Ankara | MVA | U94848 |
| Vaccinia virus Clone3 | CLONE3 | AY138848 |

[0213] 1. Lister and LIVP Strains

[0214] Exemplary vaccinia viruses are Lister or LIVP vaccinia viruses. Lister (also referred to as Elstree) vaccinia virus is available from any of a variety of sources. For example, the Elstree vaccinia virus is available at the ATCC under Accession Number VR-1549. The Lister vaccinia strain has high transduction efficiency in tumor cells with high levels of gene expression.

[0215] The vaccinia virus in the compositions provided herein can be based on modifications to the Lister strain of vaccinia virus. LIVP is a vaccinia strain derived from Lister (ATCC Catalog No. VR-1549). As described elsewhere herein, the LIVP strain can be obtained from the Lister Institute of Viral Preparations, Moscow, Russia; the Microorganism Collection of FSRI SRC VB Vector; or can be obtained from the Moscow Ivanovsky Institute of Virology (C0355 K0602). The LIVP strain was used for vaccination throughout the world, particularly in India and Russia, and is widely available. LIVP and its production are described, for example, in U.S. Pat. Nos. 7,588,767, 7,588,771, 7,662,398 and 7,754,221 and U.S. Patent Publication Nos. 2007/0202572, 2007/0212727, 2010/0062016, 2009/0098529, 2009/0053244, 2009/0155287, 2009/0117034, 2010/0233078, 2009/0162288, 2010/0196325, 2009/0136917, 2011/0064650; Zhang et al. (2009) Mol. Genet. Genomics, 282:417-435). A sequence of a parental genome of LIVP is set forth in SEQ ID NO:1.

[0216] LIVP strains in the compositions provided herein also include clonal strains that are derived from LIVP and that can be present in a virus preparation propagated from LIVP. The LIVP clonal strains have a genome that differs from the parental sequence set forth in SEQ ID NO:1. The clonal strains provided herein exhibit greater anti-tumorigenicity and/or reduced toxicity compared to the recombinant or modified virus strain designated GLV-1h68 (having a genome set forth in SEQ ID NO:9).

[0217] The LIVP and clonal strains have a sequence of nucleotides that have at least 70%, such as at least 75%, 80%, 85% or 90% sequence identity to SEQ ID NO: 1. For example, the clonal strains have a sequence of nucleotides that has at least 91%, 92%, 93%, 94%, 95%, 95%, 97%, 98%, 99%, 99.1%, 99.2%, 99.3%, 99.4%, 99.5%, 99.6%, 99.7%, 99.8%, 99.9% or 100% sequence identity to SEQ ID NO: 1. Such LIVP clonal viruses include viruses that differ in one or more open reading frames (ORF) compared to the parental LIVP strain that has a sequence of amino acids set forth in SEQ ID NO: 1. The LIVP clonal virus strains provided herein can contain a nucleotide deletion or mutation in any one or more nucleotides in any ORF compared to SEQ ID NO: 1, or can contain an addition or insertion of viral DNA compared to SEQ NO: 1.

[0218] LIVP strains in the compositions provided herein include those that have a nucleotide sequence corresponding to nucleotides 10,073-180,095 of SEQ ID NO:2, nucleotides 11,243-182,721 of SEQ ID NO:3, nucleotides 6,264-181,390 of SEQ ID NO:4, nucleotides 7,044-181,820 of SEQ ID NO:5, nucleotides 6,674-181,409 of SEQ ID NO:6, nucleotides 6,716-181,367 of SEQ ID NO:7 or nucleotides 6,899-181,870 of SEQ ID NO:8, or to a complement thereof. In some examples, the LIVP strain for use in the methods is a clonal strain of LIVP or a modified form thereof containing a sequence of nucleotides that has at least 97%, 98%, 99% or more sequence identity to a sequence of nucleotides 10,073-180,095 of SEQ ID NO:2, nucleotides 11,243-182,721 of SEQ ID NO:3, nucleotides 6,264-181,390 of SEQ ID NO:4, nucleotides 7,044-181,820 of SEQ ID NO:5, nucleotides 6,674-181,409 of SEQ ID NO:6, nucleotides 6,716-181,367 of SEQ ID NO:7 or nucleotides 6,899-181,870 of SEQ ID NO:8. LIVP clonal strains provided herein generally also include terminal nucleotides corresponding to a left and/or right inverted terminal repeat (ITR). Exemplary LIVP strains include but are not limited to virus strains designated LIVP 1.1.1 having a genome containing a sequence of nucleotides set forth in SEQ ID NO: 2 or a sequence of nucleotides that exhibits at least 97% sequence identity to SEQ ID NO:2; a virus strain designated LIVP 2.1.1 having a genome containing a sequence of nucleotides set forth in SEQ ID NO: 3 or a sequence of nucleotides that exhibits at least 97%, 98%, 99% or more sequence identity to SEQ ID NO:3; a virus strain designated LIVP 4.1.1 having a genome containing a sequence of nucleotides set forth in SEQ ID NO: 4 or a sequence of nucleotides that exhibits at least 97%, 98%, 99% or more sequence identity to SEQ ID NO:4; a virus strain designated LIVP 5.1.1 having a genome containing a sequence of nucleotides set forth in SEQ ID NO: 5 or a sequence of nucleotides that exhibits at least 97%, 98%, 99% or more sequence identity to SEQ ID NO:5; a virus strain designated LIVP 6.1.1 having a sequence of nucleotides set forth in SEQ ID NO: 6 or a sequence of nucleotide that exhibits at least 97%, 98%, 99% or more sequence identity to SEQ ID NO:6; a virus strain designated LIVP 7.1.1 having a genome containing a sequence of nucleotides set forth in SEQ ID NO: 7 or a sequence of nucleotides that exhibits at least 97%, 98%, 99% or more sequence identity to SEQ ID NO:7; or a virus strain designated LIVP 8.1.1 having a genome containing a sequence of nucleotides set forth in SEQ ID NO: 8 or a sequence of nucleotides that exhibits at least 97%, 98%, 99% or more sequence identity to SEQ ID NO:8.

[0219] 2. Heterologous Nucleic Acid and Modified Viruses

[0220] The large genome size of poxviruses, such as the vaccinia viruses in the compositions provided herein, allows large inserts of heterologous DNA and/or multiple inserts of heterologous DNA to be incorporated into the genome (Smith and Moss (1983) Gene 25(1):21-28). The vaccinia viruses in the compositions provided herein can be modified by insertion of 1, 2, 3, 4, 5, 6, 7, 8, 9, 10 or more heterologous DNA molecules. Generally, the one or more heterologous DNA molecules are inserted into a non-essential region of the virus genome. For example, the one or more heterologous DNA molecules are inserted into a locus of the virus genome that is non-essential for replication in proliferating cells, such as tumor cells. Exemplary insertion sites are provided herein below and are known in the art.

[0221] In some examples, the virus can be modified to express an exogenous or heterologous gene. Exemplary exogenous gene products include proteins and RNA molecules. The modified viruses can express a therapeutic gene product, a detectable gene product, a gene product for manufacturing or harvesting, an antigenic gene product for antibody harvesting, or a viral gene product. The characteristics of such gene products are described herein and elsewhere.

[0222] In some examples, the viruses can be modified to express two or more gene products, such as 2, 3, 4, 5, 6, 7, 8, 9, 10 or more gene products, where any combination of the two or more gene products can be one or more detectable gene products, therapeutic gene products, gene products for manufacturing or harvesting or antigenic gene products for antibody harvesting or a viral gene product. In one example, a virus can be modified to express an anticancer gene product. In another example, a virus can be modified to express two or more gene products for detection or two or more therapeutic gene products. In some examples, one or more proteins involved in biosynthesis of a luciferase substrate can be expressed along with luciferase. When two or more exogenous genes are introduced, the genes can be regulated under the same or different regulatory sequences, and the genes can be inserted in the same or different regions of the viral genome, in a single or a plurality of genetic manipulation steps. In some examples, one gene, such as a gene encoding a detectable gene product, can be under the control of a constitutive promoter, while a second gene, such as a gene encoding a therapeutic gene product, can be under the control of an inducible promoter. Methods for inserting two or more genes into a virus are known in the art and can be readily performed for a wide variety of viruses using a wide variety of exogenous genes, regulatory sequences, and/or other nucleic acid sequences.

[0223] The heterologous DNA can be an exemplary gene, including any from the list of human genes and genetic disorders authored and edited by Dr. Victor A. McKusick and his colleagues at Johns Hopkins University and elsewhere, and developed for the World Wide Web by NCBI, the National Center for Biotechnology Information; online, Mendelian Inheritance in Man, OMIM™ Center for Medical Genetics, Johns Hopkins University (Baltimore, Md.), and National Center for Biotechnology Information, National Library of Medicine (Bethesda, Md.), 1999; and those available in public databases, such as PubMed and GenBank (see, e.g., (ncbi.nlm.nih.gov/entrez/query.fcgi?db=OMIM).

[0224] In particular, viruses provided herein can be modified to express an anti-tumor antibody, an anti-metastatic gene or metastasis suppressor genes; cell matrix degradative genes; hormones; growth factors; immune modulatory molecules, including a cytokine, such as interleukins or interferons, a chemokine, including CXC chemokines, costimulatory molecules; ribozymes; transporter protein; antibody or fragment thereof; antisense RNA; siRNA; microRNAs; protein ligands; a mitosis inhibitor protein; an antimiotic oligopeptide; an anti-cancer polypeptide; anti-cancer antibiotics; angiogenesis inhibitors; anti-angiogenic factors; tissue factors; a prodrug converting enzyme; genes for tissue regeneration and reprogramming human somatic cells to pluripotency; enzymes that modify a substrate to produce a detectable product or signal or are detectable by antibodies; a viral attenuation factors; a superantigen; proteins that can bind a contrasting agent, chromophore, or a compound of ligand that can be detected; tumor suppressors; cytotoxic protein; cytostatic protein; genes for optical imaging or detection including luciferase, a fluorescent protein such as a green fluorescent protein (GFP) or GFP-like protein, a red fluorescent protein (RFP), a far-red fluorescent protein, a near-infrared fluorescent protein, a yellow fluorescent protein (YFP), an orange fluorescent protein (OFP), a cerulean fluorescent proein (CFP), or a blue fluorescent protein (BFP), and phycobiliproteins from certain cyanobacteria and eukaryotic algae, including phycoerythrins (red) and the phycocyanins (blue); genes for PET imaging; genes for MRI imaging; or genes to alter attenuation of the viruses.

[0225] a. Exemplary Modifications

[0226] Exemplary heterologous genes for modification of viruses herein are known in the art (see e.g. U.S. Pub. Nos. US2003-0059400, US2003-0228261, US2009-0117034, US2009-0098529, US2009-0053244, US2009-0081639 and US2009-0136917; U.S. Pat. Nos. 7,588,767 and 7,763,420; and International Pub. No. WO 2009/139921). A non-limiting description of exemplary genes encoding heterologous proteins for modification of virus strains is set forth in the following table. The sequence of the gene and encoded proteins are known to one of skill in the art from the literature. Hence, provided herein are virus strains, including any of the clonal viruses provided herein, that contain nucleotides encoding any of the heterologous proteins listed in Table 3B.

TABLE 3B
Exemplary Genes and Gene Products

```
Detectable gene products
  Optical Imaging
  Luciferase
```

bacterial luciferase
luciferase (from Vibrio harveyi or Vibrio fischerii)

luxA
luxB
luxC
luxD
luxE
luxAB
luxCD
luxABCDE

firefly luciferase
Renilla luciferase from Renilla renformis
Gaussia luciferase
luciferases found among marine arthropods
luciferases that catalyze the oxidation of Cypridina (Vargula) luciferin
luciferases that catalyze the oxidation of Coleoptera luciferin

luciferase photoproteins

aequorin photoprotein to which luciferin is non-covalently bound

click beetle luciferase

CBG99
CBG99-mRFP1

Fusion Proteins

Ruc-GFP

Fluorescent Proteins
GFP

aequorin from Aequorea victoria
GFP from Aequorea victoria
GFP from Aequorea coerulescens
GFP from the anthozoan coelenterates Renilla reniformis and Renilla kollikeri
(sea pansies)
Emerald (Initrogen, Carlsbad, CA)
EGFP (Clontech, Palo Alto, CA)
Azami-Green (MBL International, Woburn, MA)
Kaede (MBL International, Woburn, MA)
ZsGreen1 (Clontech, Palo Alto, CA)
CopGFP (Evrogen/Axxora, LLC, San Diego, CA)
Anthozoa reef coral
Anemonia sea anemone
Renilla sea pansy
Galaxea coral
Acropora brown coral
Trachyphyllia stony coral
Pectiniidae stony coral
GFP-like proteins

RFP

RFP from the corallimorph Discosoma (DsRed) (Matz et al. (1999) Nature
Biotechnology 17: 969-973)
Heteractis reef coral, Actinia or Entacmaea sea anemone
RFPs from Discosoma variants

mRFP1 (Wang et al. (2004) Proc. Natl. Acad. Sci. U.S.A.101: 16745-9)
mCherry (Wang et al. (2004) PNAS USA.101(48): 16745-9)
tdTomato (Wang et al. (2004) PNAS USA.101(48): 16745-9)
mStrawberry (Wang et al. (2004) PNAS USA.101(48): 16745-9)
mTangerine (Wang et al. (2004) PNAS USA.101(48): 16745-9)
DsRed2 (Clontech, Palo Alto, CA)
DsRed-T1 (Bevis and Glick (2002) Nat. Biotechnol. 20: 83-87)
Anthomedusa J-Red (Evrogen)
Anemonia AsRed2 (Clontech, Palo Alto, CA)

far-red fluorescent protein

TurboFP635
mNeptune monomeric far-red fluorescent protein
Actinia AQ143 (Shkrob et al. (2005) Biochem J. 392(Pt 3): 649-54)
Entacmaea eqFP611 (Wiedenmann et al. (2002) PNAS USA. 99(18): 11646-51)
Discosoma variants

mPlum (Wang et al. (2004) PNAS USA.101(48): 16745-9)
mRasberry (Wang et al. (2004) PNAS USA.101(48): 16745-9)
Heteractis HcRed1 and t-HcRed (Clontech, Palo Alto, CA)

IFP (infrared fluorescent protein)
near-infrared fluorescent protein
YFP

EYFP (Clontech, Palo Alto, CA)
YPet (Nguyen and Daugherty (2005) Nat Biotechnol. 23(3): 355-60)
Venus (Nagai et al. (2002) Nat. Biotechnol. 20(1): 87-90)
ZsYellow (Clontech, Palo Alto, CA)
mCitrine (Wang et al. (2004) PNAS USA.101(48): 16745-9)

OFP

cOFP (Stratagene, La Jolla, CA)
mKO (MBL International, Woburn, MA)
mOrange (Wang et al.. (2004) PNAS USA.101(48): 16745-9)

CFP

Cerulean (Rizzo (2004) Nat Biotechnol. 22(4): 445-9)
mCFP (Wang et al. (2004) PNAS USA.101(48): 16745-9)
AmCyan1 (Clontech, Palo Alto, CA)
MiCy (MBL International, Woburn, MA)
CyPet (Nguyen and Daugherty (2005) Nat Biotechnol. 23(3): 355-60)

BFP

EBFP (Clontech, Palo Alto, CA);
phycobiliproteins from certain cyanobacteria and eukaryotic algae, phycoerythrins
(red) and the phycocyanins (blue)

R-Phycoerythrin (R-PE)
B-Phycoerythrin (B-PE)
Y-Phycoerythrin (Y-PE
C-Phycocyanin (P-PC)
R-Phycocyanin (R-PC)
Phycoerythrin 566 (PE 566)
Phycoerythrocyanin (PEC)
Allophycocyanin (APC)
frp Flavin Reductase
CBP Coelenterazine-binding protein 1
PET imaging

Cyp11B1 transcript variant 1
Cyp11B1 transcript variant 2
Cyp11B2
AlstR
PEPR-1
LAT-4 (SLC43A2)
Cyp51 transcript variant 1
Cyp51 transcript variant 2

Transporter proteins
Solute carrier transporter protein families (SLC)

SLC1 solute carrier 1 transporter protein family
SLC1A1, SLC1A2, SLC1A3, SLC1A4, SLC1A5, SLC1A6, SLC1A7
SLC2 solute carrier 2 transporter protein family
SLC2A1, SLC2A2, SLC2A3, SLC2A4, SLC2A5, SLC2A6, SLC2A7, SLC2A8,
SLC2A9, SLC2A10, SLC2A11, SLC2A12, SLC2A13, SLC2A14)
SLC3 solute carrier 3 transporter protein family
SLC3A1, SLC3A2
SLC 4 solute carrier 4 transporter protein family
SLC4A1, SLC4A2, SLC4A3, SLC4A4, SLC4A5, SLC4A6, SLC4A7, SLC4A8,
SLC4A9, SLC4A10, SLC4A11
SLC5 solute carrier 5 transporter protein family
SLC5A1 sodium/glucose cotransporter 1
SLC5A2 sodium/glucose cotransporter 2
SLC5A3 sodium/myo-inositol cotransporter
SLC5A4 low affinity sodium-glucose cotransporter
SLC5A5 sodium/iodide cotransporter
SLC5A6 sodium-dependent multivitamin transporter
SLC5A7 high affinity choline transporter 1
SLC5A8 sodium-coupled monocarboxylate transporter 1
SLC5A9 sodium/glucose cotransporter 4
SLC5A10 sodium/glucose cotransporter 5, isoform 1
sodium/glucose cotransporter 5, isoform 2
sodium/glucose cotransporter 5, isoform 3
sodium/glucose cotransporter 5, isoform 4
SLC5A11 sodium/myo-inositol cotransporter 2, isoform 1
sodium/myo-inositol cotransporter 2, isoform 2
sodium/myo-inositol cotransporter 2, isoform 3
sodium/myo-inositol cotransporter 2, isoform 4
SLC5A12 sodium-coupled monocarboxylate transporter 2, isoform 1
sodium-coupled monocarboxylate transporter 2, isoform 2

Sodium Iodide Symporter (NIS)
hNIS (NM_000453)
hNIS (BC105049)
hNIS (BC105047)
hNIS (non-functional hNIS variant containing an additional 11 aa)

SLC6 solute carrier 6 transporter protein family
SLC6A1 sodium- and chloride-dependent GABA transporter 1
SLC6A2 norepinephrine transporter (sodium-dependent noradrenaline transporter)
SLC6A3 sodium-dependent dopamine transporter
SLC6A4 sodium-dependent serotonin transporter
SLC6A5 sodium- and chloride-dependent glycine transporter 1
SLC6A6 sodium-and chloride-dependent taurine transporter
SLC6A7 sodium-dependent proline transporter
SLC6A8 sodium- and chloride-dependent creatine transporter
SLC6A9 sodium- and chloride-dependent glycine transporter 1, isoform 1
sodium- and chloride-dependent glycine transporter 1, isoform 2
sodium- and chloride-dependent glycine transporter 1, isoform 3
SLC6A10 sodium- and chloride-dependent creatine transporter 2
SLC6A11 sodium- and chloride-dependent GABA transporter 3
SLC6A12 sodium- and chloride-dependent betaine transporter
SLC6A13 sodium- and chloride-dependent GABA transporter 2
SLC6A14 Sodium- and chloride-dependent neutral and basic amino acid transporter
B(0+)
SLC6A15 Orphan sodium- and chloride-dependent neurotransmitter transporter
NTT73
SLC6A16 Orphan sodium- and chloride-dependent neurotransmitter transporter
NTT5
SLC6A17 Orphan sodium- and chloride-dependent neurotransmitter transporter
NTT4
Sodium SLC6A18 Sodium- and chloride-dependent transporter XTRP2
SLC6A19 Sodium-dependent neutral amino acid transporter B(0)
SLC6A20 Sodium- and chloride-dependent transporter XTRP3
Norepinephrine Transporter (NET)

Human Net (hNET) transcript variant 1 (NM_001172504)
Human Net (hNET) transcript variant 2 (NM_001172501)
Human Net (hNET) transcript variant 3 (NM_001043)
Human Net (hNET) transcript variant 4 (NM_001172502)
Non-Human Net

SLC7 solute carrier 7 transporter protein family
SLC7A1, SLC7A2, SLC7A3, SLC7A4, SLC7A5, SLC7A6, SLC7A7, SLC7A8,
SLC7A9, SLC7A10, SLC7A11, SLC7A13, SLC7A14
SLC8 solute carrier 8 transporter protein family
SLC8A1, SLC8A2, SLC8A3
SLC9 solute carrier 9 transporter protein family
SLC9A1, SLC9A2, SLC9A3, SLC9A4, SLC9A5, SLC9A6, SLC9A7, SLC9A8,
SLC9A9, SLC9A10, SLC9A11
SLC10 solute carrier 10 transporter protein family
SLC10A1, SLC10A2, SLC10A3, SLC10A4, SLC10A5, SLC10A6, SLC10A7
SLC11 solute carrier 11 transporter protein family
SLC11A1
SCL11A2 or hDMT

SLC11A2 transcript variant 4
SLC11A2 transcript variant 1
SLC11A2 transcript variant 2
SLC11A2 transcript variant 3
SLC11A2 transcript variant 5
SLC11A2 transcript variant 6
SLC11A2 transcript variant 7

SLC12 solute carrier 12 transporter protein family
SLC12A1, SLC12A1, SLC12A2, SLC12A3, SLC12A4, SLC12A5, SLC12A6,
SLC12A7, SLC12A8, SLC12A9
SLC13 solute carrier 13 transporter protein family
SLC13A1, SLC13A2, SLC13A3, SLC13A4, SLC13A5
SLC14 solute carrier 14 transporter protein family
SLC14A1, SLC14A2
SLC15 solute carrier 15 transporter protein family
SLC15A1, SLC15A2, SLC15A3, SLC15A4
SLC16 solute carrier 16 transporter protein family
SLC16A1, SLC16A2, SLC16A3, SLC16A4, SLC16A5, SLC16A6, SLC16A7,
SLC16A8, SLC16A9, SLC16A10, SLC16A11, SLC16A12, SLC16A13,
SLC16A14
SLC17 solute carrier 17 transporter protein family
SLC17A1, SLC17A2, SLC17A3, SLC17A4, SLC17A5, SLC17A6, SLC17A7,
SLC17A8
SLC18 solute carrier 18 transporter protein family
SLC18A1, SLC18A2, SLC18A3
SLC19 solute carrier 19 transporter protein family
SLC19A1, SLC19A2, SLC19A3
SLC20 solute carrier 20 transporter protein family
SLC20A1, SLC20A2
SLC21 solute carrier 21 transporter protein family

subfamily 1; SLCO1A2, SLCO1B1, SLCO1B3, SLCO1B4,
SLCO1C1
subfamily 2; SLCO2A1, SLCO2B1
subfamily 3; SLCO3A1
subfamily 4; SLCO4A1, SLCO4C1
subfamily 5; SLCO5A1

SLC22 solute carrier 22 transporter protein family
SLC22A1, SLC22A2, SLC22A3, SLC22A4, SLC22A5, SLC22A6, SLC22A7,
SLC22A8, SLC22A9, SLC22A10, SLC22A11, SLC22A12, SLC22A13,
SLC22A14, SLC22A15, SLC22A16, SLC22A17, SLC22A18, SLC22A19,
SLC22A20
SLC23 solute carrier 23 transporter protein family
SLC23A1, SLC23A2, SLC23A3, SLC23A4
SLC24 solute carrier 24 transporter protein family
SLC24A1, SLC24A2, SLC24A3, SLC24A4, SLC24A5, SLC24A6
SLC25 solute carrier 25 transporter protein family
SLC25A1, SLC25A2, SLC25A3, SLC25A4, SLC25A5, SLC25A6, SLC25A7,
SLC25A8, SLC25A9, SLC25A10, SLC25A11, SLC25A12, SLC25A13,
SLC25A14, SLC25A15, SLC25A16, SLC25A17, SLC25A18, SLC25A19,
SLC25A20, SLC25A21, SLC25A22, SLC25A23, SLC25A24, SLC25A25,
SLC25A26, SLC25A27, SLC25A28, SLC25A29, SLC25A30, SLC25A31,
SLC25A32, SLC25A33, SLC25A34, SLC25A35, SLC25A36, SLC25A37,
SLC25A38, SLC25A39, SLC25A40, SLC25A41, SLC25A42, SLC25A43,
SLC25A44, SLC25A45, SLC25A46
SLC26 solute carrier 26 transporter protein family
SLC26A1, SLC26A2, SLC26A3, SLC26A4, SLC26A5, SLC26A6, SLC26A7,
SLC26A8, SLC26A9, SLC26A10, SLC26A11
SLC27 solute carrier 27 transporter protein family
SLC27A1, SLC27A2, SLC27A3, SLC27A4, SLC27A5, SLC27A6
SLC28 solute carrier 28 transporter protein family
SLC28A1, SLC28A2, SLC28A3
SLC29 solute carrier 29 transporter protein family
SLC29A1, SLC29A2, SLC29A3, SLC29A4
SLC30 solute carrier 30 transporter protein family
SLC30A1, SLC30A2, SLC30A3, SLC30A4, SLC30A5, SLC30A6, SLC30A7,
SLC30A8, SLC30A9, SLC30A10
SLC31 solute carrier 31 transporter protein family
SLC31A1
SLC32 solute carrier 32 transporter protein family
SLC32A1
SLC33 solute carrier 33 transporter protein family
SLC33A1
SLC34 solute carrier 34 transporter protein family
SLC34A1, SLC34A2, SLC34A3
SLC35 solute carrier 35 transporter protein family

subfamily A; SLC35A1, SLC35A2, SLC35A3, SLC35A4, SLC35A5
subfamily B; SLC35B1, SLC35B2, SLC35B3, SLC35B4
subfamily C; SLC35C1, SLC35C2
subfamily D; SLC35D1, SLC35D2, SLC35D3
subfamily E; SLC35E1, SLC35E2, SLC35E3, SLC35E4

SLC36 solute carrier 36 transporter protein family
SLC36A1, SLC36A2, SLC36A3, SLC36A4
SLC37 solute carrier 37 transporter protein family
SLC37A1, SLC37A2, SLC37A3, SLC37A4
SLC38 solute carrier 38 transporter protein family
SLC38A1, SLC38A2, SLC38A3, SLC38A4, SLC38A5, SLC38A6
SLC39 solute carrier 39 transporter protein family
SLC39A1, SLC39A2, SLC39A3, SLC39A4, SLC39A5, SLC39A6, SLC39A7,
SLC39A8, SLC39A9, SLC39A10, SLC39A11, SLC39A12, SLC39A13,
SLC39A14
SLC40 solute carrier 40 transporter protein family
SLC40A1
SLC41 solute carrier 41 transporter protein family
SLC41A1, SLC41A2, SLC41A3
SLC42 solute carrier 42 transporter protein family
RHAG, RhBG, RhCG
SLC43 solute carrier 43 transporter protein family
SLC43A1
SLC43A2
SLC43A3
SLC44 solute carrier 44 transporter protein family
SLC44A1, SLC44A2, SLC44A3, SLC44A4, SLC44A5
SLC45 solute carrier 45 transporter protein family
SLC45A1, SLC45A2, SLC54A3, SLC45A4
SLC46 solute carrier 46 transporter protein family
SLC46A1, SLC46A2
SLC47 solute carrier 47 transporter protein family
SLC47A1, SLC47A2

MRI Imaging

Human transferrin receptor
Human transferrin receptor
Mouse transferrin receptor
Human ferritin light chain (FTL)
Human ferritin heavy chain
FTL 498-199InsTC, a mutated form of the ferritin light chain
Bacterial ferritin

E. coli
E. coli strain K12
S. aureus strain MRSA252
S. aureus strain NCTC 8325
H. pylori B8

bacterioferritin
codon optimized bacterioferritin
MagA

Enzymes that modify a substrate to produce a detectable product or signal, or are
detectable by antibodies

alpha-amylase
alkaline phosphatase
secreted alkaline phosphatase
peroxidase
T4 lysozyme
oxidoreductase
pyrophosphatase

Therapeutic genes
therapeutic gene product
antigens

tumor specific antigens
tumor-associated antigens
tissue-specific antigens
bacterial antigens
viral antigens
yeast antigens
fungal antigens
protozoan antigens
parasite antigens
mitogens

an antibody or fragment thereof

virus-specific antibodies

antisense RNA
siRNA

siRNA directed against expression of a tumor-promoting gene

an oncogene
growth factor
angiogenesis promoting gene
a receptor

siRNA molecule directed against expression of any gene essential for cell growth,
cell replication or cell survival.
siRNA molecule directed against expression of any gene that stabilizes the cell
membrane or otherwise limits the number of tumor cell antigens released from the
tumor cell.

protein ligands
an antitumor oligopeptide
an antimitotic peptide

tubulysin,
phomopsin
hemiasterlin
taltobulin (HTI-286, 3)
cryptophycin

a mitosis inhibitor protein
an antimitotic oligopeptide
an anti-cancer polypeptide antibiotic
anti-cancer antibiotics

tissue factors

Tissue Factor (TF)
αvβ3-integrin RGD fusion protein

Immune modulatory molecules

GM-CSF
MCP-1 or CCL2 (Monocyte Chemoattractant Protein-1) Human
MCP-1 murine
IP-10 or Chemokine ligand 10 (CXCL10)
LIGHT
P60 or SEQSTM1 (Sequestosome 1 transcript variant 1)
P60 or SEQSTM1 (Sequestosome 1 transcript variant 3)
P60 or SEQSTM1 (Sequestosome 1 transcript variant 2)
OspF
OspG
STAT1alpha
STAT1beta

Interleukins

IL-18 (Interleukin-18)
IL-11 (Interleukin-11)
IL-6 (Interleukin-6)
sIL-6R-IL-6
interleukin-12
interleukin-1
interleukin-2
IL-24 (Interleukin-24)
IL-24 transcript variant 1
IL-24 transcript variant 4
IL-24 transcript variant 5
IL-4
IL-8
IL-10

chemokines

IP-10 (CXCL)
Thrombopoetin
members of the C—X—C and C-C chemokine families
RANTES
MIP1-alpha
MIP1-beta
MIP-2

CXC chemokines

GROα
GROβ (MIP-2)
GROγ
ENA-78
LDGF-PPBP
GCP-2
PF4
Mig
IP-10
SDF-1α/β
BUNZO/STRC33
I-TAC
BLC/BCA-1
MDC
TECK
TARC
HCC-1
HCC-4
DC-CK1
MIP-3α
MIP-3β
MCP-2
MCP-3 (Monocyte Chemoattractant Protein-3, CCL7)
MCP-4
MCP-5 (Monocyte Chemoattractant Protein-5; CCL12)
Eotaxin (CCL11)
Eotaxin-2/MPIF-2
I-309
MIP-5/HCC-2
MPIF-1
6Ckine
CTACK
MEC
lymphotactin
fractalkine

Immunoglobulin superfamily of cytokines

B7.1
B7.2.

Anti-angiogenic genes/angiogenesis inhibitors

Human plasminogen k5 domain (hK5)
PEDF (SERPINF1) (Human)
PEDF (mouse)
anti-VEGF single chain antibody (G6)
anti-DLL4 s.c. antibody GLAF-3
tTF-RGD (truncated human tissue factor protein fused to an RGD peptide)

viral attenuation factors

Interferons

IFN-γ
IFN-α
IFN-β

Antibody or scFv

Therapeutic antibodies (i.e. anticancer antibodies)

Rituximab (RITUXAN)
ADEPT
Trastuzumab (Herceptin)
Tositumomab (Bexxar)
Cetuximab (Erbitux)
Ibritumomab (90Y-Ibritumomab tiuexetan; Zevalin)
Alemtuzumab (Campath-1H)
Epratuzumab (Lymphocide)
Gemtuzumab ozogamicin (Mylotarg)
Bevacimab (Avastin) and Edrecolomab (Panorex)
Infliximab

Metastasis suppressor genes

NM23 or NME1 Isoform a
NM23 or NME1 Isoform b

Anti-metastatic genes

E-Cad
Gelsolin
LKB1 (STK11)
RASSF1
RASSF2
RASSF3
RASSF4
RASSF5
RASSF6
RASSF7
RASSF8
Syk
TIMP-1 (Tissue Inhibitor of Metalloproteinase Type-1)
TIMP-2 (Tissue Inhibitor of Metalloproteinase Type-2)
TIMP-3 (Tissue Inhibitor of Metalloproteinase Type-3)
TIMP-4 (Tissue Inhibitor of Metalloproteinase Type-4)
BRMS-1
CRMP-1
CRSP3
CTGF
DRG1
KAI1
KiSS1 (kisspeptin)
kisspeptin fragments

kisspeptin-10
kisspeptin-13
kisspeptin-14
kisspeptin-54

Mkk4
Mkk6
Mkk7
RKIP
RHOGDI2
SSECKS
TXNIP/VDUP1

Cell matrix-degradative genes

Relaxin 1
hMMP9

Hormones

Human Erythropoietin (EPO)

MicroRNAs

pre-miRNA 181a (sequence inserted into viral genome)
miRNA 181a
mmu-miR-181a MIMAT0000210 mature miRNA 181a
pre-miRNA 126 (sequence inserted into the vial genome)
miRNA 126
hsa-miR-126 MI000471
hsa-miR-126 MIMAT0000445
pre-miRNA 335 (sequence inserted into the viral genome)
miRNA 335
hsa-miR-335 MI0000816
hsa-miR-335 MIMAT0000765

Genes for tissue regeneration and reprogramming Human somatic cells to pluripotency

nAG
Oct4
NANOG
Ngn (Neogenin 1) transcript variant 1
Ngn (Neogenin 1) transcript variant 2
Ngn (Neogenin 1) transcript variant 3
Ngn3
Pdx1
Mafa

Additional Genes

Myc-CTR1
FCU1
mMnSOD
HACE1
nppa1
GCP-2 (Granulocyte Chemotactic Protein-2, CXCL6)
hADH
Wildtype CDC6
Mut CDC6
GLAF-3 anti-DLL4 scFv
GLAF-4 anti-FAP (Fibroblast Activation Protein) scFv (Brocks et al., (2001) Mol.
Medicine 7(7): 461-469)
GLAF-5 anti-FAP scFv
BMP4
wildtype F14.5L

Other Proteins

WT1
p53
pseudomonas exotoxin
diphtheria toxin
Arf or p16
Bax
Herpes simplex virus thymidine kinase
E. coli purine nucleoside phosphorylase
angiostatin
endostatin
Rb
BRCA1
cystic fibrosis transmembrane regulator (CFTR)
Factor VIII
low density lipoprotein receptor
alpha-galactosidase
beta-glucocerebrosidase
insulin
parathyroid hormone
alpha-1-antitrypsin
rsCD40L
Fas-ligand
TRAIL
TNF
microcin E492
xanthineguanine phosphoribosyltransferase (XGPRT)
E. coli guanine phosphoribosyltransferase (gpt)
hyperforin
endothelin-1 (ET-1)
connective tissue growth factor (CTGF)
vascular endothelial growth factor (VEGF)
cyclooxygenase
COX-2
cyclooxygenase-2 inhibitor
MPO (Myeloperoxidase)
Apo A1 (Apolipoprotein A1)
CRP (C Reactive Protein)
Fibrinogen
SAP (Serum Amyloid P)
FGF-basic (Fibroblast Growth Factor-basic)
PPAR-agonist
PE37/TGF-alpha fusion protein

Replacement of the A34R gene with another A34R gene from a different strain in order
to increase the EEV form of the virus

A34R from VACV IHD-J
A34R with a mutation at codon 151 (Lys 151 to Asp)
A34R with a mutation at codon 151 (Lys 151 to Glu)

Non-coding Sequence

Non-proteins
Non-coding nucleic acid

Ribozymes

Group I introns
Group II introns
RNaseP
hairpin ribozymes
hammerhead ribozymes

Prodrug converting enzymes

varicella zoster thymidine kinase
cytosine deaminase
purine nucleoside phosphorylase (e.g., from E. coli)
beta lactamase
carboxypeptidase G2
carboxypeptidase A
cytochrome P450

cytochrome P450-2B1
cytochrome P450-4B1

horseradish peroxidase
nitroreductase
rabbit carboxylesterase
mushroom tyrosinase
beta galactosidase (lacZ) (i.e., from E. coli)
beta glucuronidase (gusA)
thymidine phosphorylase
deoxycytidine kinase
linamerase

Proteins detectable by antibodies

chloramphenicol acetyl transferase
hGH

Viral attenuation factors

virus-specific antibodies

mucins
thrombospondin

tumor necrosis factors (TNFs)

TNFα

Superantigens
Toxins

diphtheria toxin
Pseudomonas exotoxin
Escherichia coli Shiga toxin
Shigella toxin
Escherichia coli Verotoxin 1
Toxic Shock Syndrome Toxin 1
Exfoliating Toxins (EXft)
Streptococcal Pyrogenic Exotoxin (SPE) A, B and C
Clostridial Perfringens Enterotoxin (CPET)
staphylococcal enterotoxins

SEA, SEB, SEC1, SEC2, SED, SEE and SEH

Mouse Mammary Tumor Virus proteins (MMTV)
Streptococcal M proteins
Listeria monocytogenes antigen p60
mycoplasma arthritis superantigens

Proteins that can bind a contrasting agent, chromophore, or a compound or ligand that
can be detected

siderophores

enterobactin
salmochelin
yersiniabactin
aerobactin

Growth Factors

platelet-derived growth factor (PDG-F)
keratinocyte growth factor (KGF)
insulin-like growth factor-1 (IGF-1)
insulin-like growth factor-binding proteins (IGFBPs)
transforming growth factor (TGF-alpha)
Growth factors for blood cells

Granulocyte Colony Stimulating Factor (G-CSF)

growth factors that can boost platelets

Other Groups

BAC (Bacterial Artificial Chromosome) encoding several or all proteins of a
specific pathway, e.g. woundhealing-pathway
MAC (Mammalian Artificial Chromosome) encoding several or all proteins of a

specific pathway, e.g. woundhealing-pathway

tumor antigen
RNAi
ligand binding proteins
proteins that can induce a signal detectable by MRI
angiogenins
photosensitizing agents
anti-metabolites
signaling modulators
chemotherapeutic compounds
lipases
proteases
pro-apoptotic factors
anti-cancer vaccine

antigen vaccines
whole cell vaccines (i.e., dendritic cell vaccines)
DNA vaccines
anti-idiotype vaccines

tumor suppressors
cytotoxic protein
cytostatic proteins
costimulatory molecules

cytokines and chemokines

cancer growth inhibitors
gene therapy
BCG vaccine for bladder cancer

Proteins that interact with host cell proteins

[0227] i. Diagnostic or Reporter Gene Products

[0228] In some examples, the viruses provided herein can express one or more additional genes whose products are detectable or whose products are capable of inducing a detectable signal. In some examples, the viruses provided herein contain nucleic acid that encodes a detectable protein or a protein capable of inducing a detectable signal. Expression of such proteins allows detection of the virus in vitro and in vivo. A variety of detectable gene products, such as detectable proteins are known in the art, and can be used with the viruses provided herein.

[0229] Exemplary of such proteins are enzymes that can catalyze a detectable reaction or catalyze formation of a detectable product, such as, for example, luciferases, such as a click beetle luciferase, a Renilla luciferase, a firefly luciferase or beta-glucoronidase (GusA). Also exemplary of such proteins are proteins that emit a detectable signal, including fluorescent proteins, such as a green fluorescent protein (GFP) or a red fluorescent protein (RFP). A variety of DNA sequences encoding proteins that can emit a detectable signal or that can catalyze a detectable reaction, such as luminescent or fluorescent proteins, are known and can be used in the viruses and methods provided herein. Transformation and expression of these genes in viruses can permit detection of viral infection, for example, using a low light and/or fluorescence imaging camera.

[0230] Exemplary genes encoding light-emitting proteins include, for example, genes from bacterial luciferase from Vibrio harveyi (Belas et al., Science 218 (1982), 791-793), bacterial luciferase from Vibrio fischerii (Foran and Brown, Nucleic acids Res. 16 (1988), 177), firefly luciferase (de Wet et al., Mol. Cell. Biol. 7 (1987), 725-737), aequorin from Aequorea victoria (Prasher et al., Biochem. 26 (1987), 1326-1332), Renilla luciferase from Renilla renformis (Lorenz et al, PNAS USA 88 (1991), 4438-4442). The luxA and luxB genes of bacterial luciferase can be fused to produce the fusion gene (Fab₂), which can be expressed to produce a fully functional luciferase protein (Escher et al., PNAS 86: 6528-6532 (1989)). In some examples, luciferases expressed by viruses can require exogenously added substrates such as decanal or coelenterazine for light emission. In other examples, viruses can express a complete lux operon, which can include proteins that can provide luciferase substrates such as decanal. For example, viruses containing the complete lux operon sequence, when injected intraperitoneally, intramuscularly, or intravenously, allowed the visualization and localization of microorganisms in live mice indicating that the luciferase light emission can penetrate the tissues and can be detected externally (Contag et al., (1995) Mol. Microbiol. 18: 593-603).

[0231] Exemplary fluorescent proteins include green fluorescent protein from Aequorea victoria (Prasher et al., Gene 111: 229-233 (1987), and GFP variants and variants of GFP-like proteins. Such fluorescent proteins include monomeric, dimeric and tetrameric fluorescent proteins. Exemplary monomeric fluorescent proteins include, but are not limited to: violet fluorescent proteins, such as for example, Sirius; blue fluorescent proteins, such as for example, Azurite, EBFP, SBFP2, EBFP2, TagBFP; cyan fluorescent proteins, such as for example, mTurquoise, eCFP, Cerulean, SCFP, TagCFP, mTFP1; green fluorescent proteins, such as for example, GFP, mUkG1, aAG1, AcGFP1, TagGFP2, EGFP, mWasabi, EmGFP (Emerald); yellow fluorescent proteins, such as for example; TagYFP, EYFP, Topaz, SYFP2, YPet, Venus, Citrine; orange fluorescent proteins, such as for example, mKO, mKO2, mOrange, mOrange2, red fluorescent proteins, such as for example; TagRFP, TagRFPt, mStrawberry, mRuby, mCherry; far red fluorescent proteins, such as for example; mRasberry, mKate2, mPlum, and mNeptune; and fluorescent proteins having an increased Stokes shift (i.e. >100 nm distance between excitation and emission spectra), such as for example, Sapphire, T-Sapphire, mAmetrine, and mKeima. Exemplary dimeric and tetrameric fluorescent proteins include, but are not limited to: AmCyan1, Midori-Ishi Cyan, copGFP (ppluGFP2), TurboGFP. ZsGreen, TurboYFP, ZsYellow1, TurboRFP, dTomato, DsRed2, DsRed-Express, DsRed-Express2, DsRed-Max, AsRed2, TurboFP602, RFP611, Katushka (TurboFP635), Katushka2, and AQ143. Excitation and emission spectra for exemplary fluorescent proteins are well-known in the art (see also e.g. Chudakov et al. (2010) Physiol Rev 90, 1102-1163).

[0232] Exemplary detectable proteins also include proteins that can bind a contrasting agent, chromophore, or a compound or ligand that can be detected, such as a transferrin receptor or a ferritin; and reporter proteins, such as E. coli β-galactosidase, β-glucuronidase, xanthine-guanine phosphoribosyltransferase (gpt).

[0233] Also exemplary of detectable proteins are gene products that can specifically bind a detectable compound, including, but not limited to receptors, metal binding proteins (e.g., siderophores, ferritins, transferrin receptors), ligand binding proteins, and antibodies. Also exemplary of detectable proteins are transporter proteins that can bind to and transport detectable molecules. Such molecules can be used for detection of the virus, such as for applications involving imaging. Any of a variety of detectable compounds can be used, and can be imaged by any of a variety of known imaging methods. Exemplary compounds include receptor ligands and antigens for antibodies. The ligand can be labeled according to the imaging method to be used. Exemplary imaging methods include, but are not limited to, X-rays, magnetic resonance methods, such as magnetic resonance imaging (MRI) and magnetic resonance spectroscopy (MRS), and tomographic methods, including computed tomography (CT), computed axial tomography (CAT), electron beam computed tomography (EBCT), high resolution computed tomography (HRCT), hypocycloidal tomography, positron emission tomography (PET), single-photon emission computed tomography (SPECT), spiral computed tomography and ultrasonic tomography.

[0234] Labels appropriate for X-ray imaging are known in the art, and include, for example, Bismuth (III), Gold (III), Lanthanum (III) or Lead (II); a radioactive ion, such as ⁶⁷Copper, ⁶⁷Gallium, ⁶⁸Gallium, ¹¹¹Indium, ¹¹³Indium, ¹²³Iodine, ¹²⁵Iodine, ¹³¹Iodine, ¹⁹⁷Mercury, ²⁰³Mercury, ¹⁸⁶Rhenium, ¹⁸⁸Rhenium, ⁹⁷Rubidium, ¹⁰³Rubidium, ⁹⁹Technetium or ⁹⁰Yttrium; a nuclear magnetic spin-resonance isotope, such as Cobalt (II), Copper (II), Chromium (III), Dysprosium (III), Erbium (III), Gadolinium (III), Holmium (III), Iron (II), Iron (III), Manganese (II), Neodymium (III), Nickel (II), Samarium (III), Terbium (III), Vanadium (II) or Ytterbium (III); or rhodamine or fluorescein.

[0235] Labels appropriate for magnetic resonance imaging are known in the art, and include, for example, gadolinium chelates and iron oxides. Use of chelates in contrast agents is known in the art. Labels appropriate for tomographic imaging methods are known in the art, and include, for example, β-emitters such as ¹¹C, ¹³N, ¹⁵O or ⁶⁴Cu or γ-emitters such as ¹²³I. Other exemplary radionuclides that can, be used, for example, as tracers for PET include ⁵⁵Co, ⁶⁷Ga, ⁶⁸Ga, ⁶⁰Cu(II), ⁶⁷Cu(II), ⁵⁷Ni, ⁵²Fe and ¹⁸F (e.g., ¹⁸F-fluorodeoxyglucose (FDG)). Examples of useful radionuclide-labeled agents are a ⁶⁴Cu-labeled engineered antibody fragment (Wu et al. (2002) PNAS USA 97: 8495-8500), ⁶⁴Cu-labeled somatostatin (Lewis et al. (1999) J. Med. Chem. 42: 1341-1347), ⁶⁴Cu-pyruvaldehyde-bis(N4-methylthiosemicarbazone)(⁶⁴Cu-PTSM) (Adonai et al. (2002) PNAS USA 99: 3030-3035), ⁵²Fe-citrate (Leenders et al. (1994) J. Neural. Transm. Suppl. 43: 123-132), ⁵²Fe/^{52m}Mn-citrate (Calonder et al. (1999) J. Neurochem. 73: 2047-2055) and ⁵²Fe-labeled iron (III) hydroxide-sucrose complex (Beshara et al. (1999) Br. J. Haematol. 104: 288-295, 296-302).

[0236] Exemplary of detectable proteins are transporter proteins that can bind to and transport detectable molecules, such as human epinephrine transporter (hNET) or sodium iodide symporter (NIS) that can bind to and transport detectable molecules, such as MIBG and other labeled molecules (e.g., Na¹²⁵I), into the cell.

[0237] Other exemplary detectable proteins are proteins encoded by genes for melanin synthesis. Many genes are known to be involved in melanin biosynthesis (see e.g. Simon et al. (2009) Pigment Cell Melanoma Res, 22:563-79). Melanin is a pigment that can be subdivided into the brownish/black eumelanin and the reddish brown pheomelanin. Exemplary of such genes include, but are not limited to, mouse tyrosinase (mTYR), human tyrosinase related protein 1 (tyrp1) and human Dopachrome tautomerase/tyrosinase related protein 2 (DC2). A virus expressing a gene for melanin synthesis can be used to infect hosts or cells to obtain cells with high light absorption rates over the whole visible spectrum. The resulting cells or animals can be imaged using any imaging system capable of detecting high light absorption rates over the whole visible spectrum and/or across different penetration scales. For example, a (multispectral) photo-/optoacoustic tomography—(MS)OAT can be used (see e.g. Ntziachristos (2010) Nature Methods, 7:603-14; Li et al. (2007) J Biomed Optics Letters, 12:1-3).

[0238] The viruses can be modified for purposes of using the viruses for imaging, including for the purpose of dual imaging in vitro and/or in vivo to detect two or more detectable gene products, gene products that produce a detectable signal, gene products that can bind a detectable compound, or gene products that can bind other molecules to form a detectable product. In some examples, the two or more gene products are expressed by different viruses, whereas in other examples the two or more gene products are produced by the same virus. For example, a virus can express a gene product that emits a detectable signal and also express a gene product that catalyzes a detectable reaction. In other examples, a virus can express one or more gene products that emit a detectable signal, one or more gene products that catalyze a detectable reaction, one or more gene products that can bind a detectable compound or that can form a detectable product, or any combination thereof. Any combination of such gene products can be expressed by the viruses provided herein and can be used in combination with any of the methods provided herein. Imaging of such gene products can be performed, for example, by various imaging methods as described herein and known in the art (e.g., fluorescence imaging, MRI, PET, among many other methods of detection). Imaging of gene products can also be performed using the same method, whereby gene products are distinguished by their properties, such as by differences in wavelengths of light emitted. For example, a virus can express more than one fluorescent protein that differs in the wavelength of light emitted (e.g., a GFP and an RFP). In another non-limiting example, an RFP can be expressed with a luciferase. In yet other non-limiting examples, a fluorescent gene product can be expressed with a gene product, such as a ferritin or a transferrin receptor, used for magnetic resonance imaging. A virus expressing two or more detectable gene products or two or more viruses expressing two or more detectable gene products can be imaged in vitro or in vivo using such methods. In some examples the two or more gene products are expressed as a single polypeptide, such as a fusion protein. For example a fluorescent protein can be expressed as a fusion protein with a luciferase protein.

[0239] Ii. Therapeutic Gene Products

[0240] Viruses provided herein also can contain a heterologous nucleic acid molecule that encodes one or more therapeutic gene products. Therapeutic gene products include products that cause cell death or cause an anti-tumor immune response. A variety of therapeutic gene products, such as toxic or apoptotic proteins, or siRNA, are known in the art, and can be used with the viruses provided herein. The therapeutic genes can act by directly killing the host cell, for example, as a channel-forming or other lytic protein, or by triggering apoptosis, or by inhibiting essential cellular processes, or by triggering an immune response against the cell, or by interacting with a compound that has a similar effect, for example, by converting a less active compound to a cytotoxic compound.

[0241] Exemplary therapeutic gene products that can be expressed by the viruses provided herein include, but are not limited to, gene products (i.e., proteins and RNAs), including those useful for tumor therapy, such as, but not limited to, an anticancer agent, an antimetastatic agent, or an antiangiogenic agent. For example, exemplary proteins useful for tumor therapy include, but are not limited to, tumor suppressors, cytostatic proteins and costimulatory molecues, such as a cytokine, a chemokine, or other immunomodulatory molecules, an anticancer antibody, such as a single-chain antibody, antisense RNA, siRNA, prodrug converting enzyme, a toxin, a mitosis inhibitor protein, an antitumor oligopeptide, an anticancer polypeptide antibiotic, an angiogenesis inhibitor, or tissue factor. For example, a large number of therapeutic proteins that can be expressed for tumor treatment in the viruses and methods provided herein are known in the art, including, but not limited to, a transporter, a cell-surface receptor, a cytokine, a chemokine, an apoptotic protein, a mitosis inhibitor protein, an antimitotic oligopeptide, an antiangiogenic factor (e.g., hk5), angiogenesis inhibitors (e.g., plasminogen kringle 5 domain, anti-vascular endothelial growth factor (VEGF) scAb, tTF-RGD, truncated human tissue factor-αᵥβ₃-integrin RGD peptide fusion protein), anticancer antibodies, such as a single-chain antibody (e.g., an antitumor antibody or an antiangiogenic antibody, such as an anti-VEGF antibody or an anti-epidermal growth factor receptor (EGFR) antibody), a toxin, a tumor antigen, a prodrug converting enzyme, a ribozyme, RNAi, and siRNA.

[0242] Additional therapeutic gene products that can be expressed by the oncolytic reporter viruses include, but are not limited to, cell matrix degradative genes, such as but not limited to, relaxin-1 and MMP9, and genes for tissue regeneration and reprogramming human somatic cells to pluripotency, such as but not limited to, nAG, Oct4, NANOS, Neogenin-1, Ngn3, Pdx1 and Mafa.

[0243] Costimulatory molecules for the methods provided herein include any molecules which are capable of enhancing immune responses to an antigen/pathogen in vivo and/or in vitro. Costimulatory molecules also encompass any molecules which promote the activation, proliferation, differentiation, maturation or maintenance of lymphocytes and/or other cells whose function is important or essential for immune responses.

[0244] An exemplary, non-limiting list of therapeutic proteins includes tumor growth suppressors such as IL-24, WT1, p53, diphtheria toxin, Arf, Bax, HSV TK, E. coli purine nucleoside phosphorylase, angiostatin and endostatin, p16, Rb, BRCA1, cystic fibrosis transmembrane regulator (CFTR), Factor VIII, low density lipoprotein receptor, beta-galactosidase, alpha-galactosidase, beta-glucocerebrosidase, insulin, parathyroid hormone, alpha-1-antitrypsin, rsCD40L, Fas-ligand, TRAIL, TNF, antibodies, microcin E492, diphtheria toxin, Pseudomonas exotoxin, Escherichia coli Shiga toxin, Escherichia coli Verotoxin 1, and hyperforin. Exemplary cytokines include, but are not limited to, chemokines and classical cytokines, such as the interleukins, including for example, interleukin-1, interleukin-2, interleukin-6 and interleukin-12, tumor necrosis factors, such as tumor necrosis factor alpha (TNF-α), interferons such as interferon gamma (IFN-γ), granulocyte macrophage colony stimulating factor (GM-CSF), erythropoietin and exemplary chemokines including, but not limited to CXC chemokines such as IL-8 GROα, GROβ, GROγ, ENA-78, LDGF-PBP, GCP-2, PF4, Mig, IP-10, SDF-1α/β, BUNZO/STRC33, I-TAC, BLC/BCA-1; CC chemokines such as MIP-1α, MIP-1β, MDC, TECK, TARC, RANTES, HCC-1, HCC-4, DC-CK1, MIP-3α, MIP-3β, MCP-1, MCP-2, MCP-3, MCP-4, Eotaxin, Eotaxin-2/MPIF-2, I-309, MIP-5/HCC-2, MPIF-1, 6Ckine, CTACK, MEC; lymphotactin; and fractalkine. Exemplary other costimulatory molecules include immunoglobulin superfamily of cytokines, such as B7.1, B7.2.

[0245] Exemplary therapeutic proteins that can be expressed by the viruses provided herein and used in the methods provided herein include, but are not limited to, erythropoietin (e.g., SEQ ID NO: 12), an anti-VEGF single chain antibody (e.g., SEQ ID NO: 13), a plasminogen K5 domain (e.g., SEQ ID NO: 14), a human tissue factor-αvβ3-integrin RGD fusion protein (e.g., SEQ ID NO: 15), interleukin-24 (e.g., SEQ ID NO: 16), or immune stimulators, such as SIL-6-SIL-6 receptor fusion protein (e.g., SEQ ID NO: 17).

[0246] In some examples, the viruses provided herein can express one or more therapeutic gene products that are proteins that convert a less active compound into a compound that causes tumor cell death. Exemplary methods of conversion of such a prodrug compound include enzymatic conversion and photolytic conversion. A large variety of protein/compound pairs are known in the art, and include, but are not limited to, Herpes simplex virus thymidine kinase/ganciclovir, Herpes simplex virus thymidine kinase/(E)-5-(2-bromovinyl)-2′-deoxyuridine (BVDU), varicella zoster thymidine kinase/ganciclovir, varicella zoster thymidine kinase/BVDU, varicella zoster thymidine kinase/(E)-5-(2-bromovinyl)-1-beta-D-arabinofuranosyluracil (BVaraU), cytosine deaminase/5-fluorouracil, cytosine deaminase/5-fluorocytosine, purine nucleoside phosphorylase/6-methylpurine deoxyriboside, beta lactamase/cephalosporin-doxorubicin, carboxypeptidase G2/4-[(2-chloroethyl)(2-mesyloxyethyl)amino]benzoyl-L-glutamic acid (CMDA), carboxypeptidase A/methotrexate-phenylamine, cytochrome P450/acetominophen, cytochrome P450-2B1/cyclophosphamide, cytochrome P450-4B1/2-aminoanthracene, 4-ipomeanol, horseradish peroxidase/indole-3-acetic acid, nitroreductase/CB1954, rabbit carboxylesterase/7-ethyl-10-[4-(1-piperidino)-1-piperidino]carbonyloxy-camptothecin (CPT-11), mushroom tyrosinase/bis-(2-chloroethyl)amino-4-hydroxyphenylaminomethanone 28, beta galactosidase/1-chloromethyl-5-hydroxy-1,2-dihydro-3H-benz[e]indole, beta glucuronidase/epirubicin glucuronide, thymidine phosphorylase/5′-deoxy-5-fluorouridine, deoxycytidine kinase/cytosine arabinoside, and linamerase/linamarin.

[0247] Other therapeutic gene products that can be expressed by the viruses provided herein include siRNA and microRNA molecules. The siRNA and/or microRNA molecule can be directed against expression of a tumor-promoting gene, such as, but not limited to, an oncogene, growth factor, angiogenesis promoting gene, or a receptor. The siRNA and/or microRNA molecule also can be directed against expression of any gene essential for cell growth, cell replication or cell survival. The siRNA and/or microRNA molecule also can be directed against expression of any gene that stabilizes the cell membrane or otherwise limits the number of tumor cell antigens released from the tumor cell. Design of an siRNA or microRNA can be readily determined according to the selected target of the siRNA; methods of siRNA and microRNA design and down-regulation of genes are known in the art, as exemplified in U.S. Pat. Pub. Nos. 2003-0198627 and 2007-0044164, and Zeng et al., Molecular Cell 9:1327-1333 (2002).

[0248] Therapeutic gene products include viral attenuation factors, such as antiviral proteins. Antiviral proteins or peptides can be expressed by the viruses provided herein. Expression of antiviral proteins or peptides can control viral pathogenicity. Exemplary viral attenuation factors include, but are not limited to, virus-specific antibodies, mucins, thrombospondin, and soluble proteins such as cytokines, including, but not limited to TNFα, interferons (for example IFNα, IFNβ, or IFNγ) and interleukins (for example IL-1, IL-12 or IL-18).

[0249] Another exemplary therapeutic gene product that can be expressed by the viruses provided herein is a protein ligand, such as antitumor oligopeptide. Antitumor oligopeptides are short protein peptides with high affinity and specificity to tumors. Such oligopeptides could be enriched and identified using tumor-associated phage libraries (Akita et al. (2006) Cancer Sci. 97(10):1075-1081). These oligopeptides have been shown to enhance chemotherapy (U.S. Pat. No. 4,912,199). The oligopeptides can be expressed by the viruses provided herein. Expression of the oligopeptides can elicit anticancer activities on their own or in combination with other chemotherapeutic agents. An exemplary group of antitumor oligopeptides is antimitotic peptides, including, but not limited to, tubulysin (Khalil et al. (2006) Chembiochem. 7(4):678-683), phomopsin, hemiasterlin, taltobulin (HTI-286, 3), and cryptophycin. Tubulysin is from myxobacteria and can induce depletion of cell microtubules and trigger the apoptotic process. The antimitotic peptides can be expressed by the viruses provide herein and elicit anticancer activities on their own or in combination with other therapeutic modalities.

[0250] Another exemplary therapeutic gene product that can be expressed by the viruses provided herein is an anti-metastatic agent that inhibits one or more steps of the metastatic cascade. The encoded anti-metastatic agents include agents that inhibit invasion of local tissue, inhibit intravasation into the bloodstream or lymphatics, inhibit cell survival and transport through the bloodstream or lymphatics as emboli or potentially single cells, inhibit cell lodging in microvasculature at the secondary site, inhibit growth into microscopic lesions and subsequently into overt metastatic lesions, and/or inhibit metastasis formation and growth within the primary tumor, where the inhibition of metastasis formation is not a consequence of inhibition of primary tumor growth.

[0251] Exemplary anti-metastatic agents expressed by the viruses provided herein can directly or indirectly inhibit one or more steps of the metastatic cascade. Exemplary anti-metastatic agents include, but are not limited to, the following: BRMS-1 (Breast Cancer Metastasis Suppressor 1), CRMP-1 (Collapsin Response Mediator Protein-1), CRSP-3 (Cofactor Required for Sp1 transcriptional activation subunit 3), CTGF (Connective Tissue Growth Factor), DRG-1 (Developmentally-regulated GTP-binding protein 1), E-Cad (E-cadherin), gelsolin, KAI1, KiSS1 (Kisspeptin 1/Metastin), kispeptin-10, kispeptin-13, kispeptin-14, kispeptin-54, LKB 1 (STK11 (serine/threonine kinase 11)), JNKK1/MKK4 (c-Jun-NH2-Kinase Kinase/Mitogen activated Kinase Kinase 4), MKK6 (mitogen activated kinase kinase 6), MKK7 (mitogen activated kinase kinase 7), Nm23 (NDP Kinase A), RASSF1-8 (Ras association (RalGDS/AF-6) domain family members), RKIP (Raf kinase inhibitor protein), RhoGDI2 (Rho GDP dissociation inhibitor 2), SSECKS (src-suppressed C-kinase substrate), Syk, TIMP-1 (Tissue inhibitor of metalloproteinase-1), TIMP-2 (Tissue inhibitor of metalloproteinase-2), TIMP-3 (Tissue inhibitor of metalloproteinase-3), TIMP-4 (Tissue inhibitor of metalloproteinase-4), TXNIP/VDUP1 (Thioredoxin-interacting protein). Such list of anti-metastatic agents is not meant to be limiting. Any gene product that can suppress metastasis formation via a mechanism that is independent of inhibition of growth within the primary tumor is encompassed by the designation of an anti-metastatic agent or metastasis suppressor and can be expressed by a virus as provided herein. One of skill in the art can identify anti-metastatic genes and can construct a virus expressing one or more anti-metastatic genes for therapy.

[0252] Another exemplary therapeutic gene product that can be expressed by the viruses provided herein is a protein that sequesters molecules or nutrients needed for tumor growth. For example, the virus can express one or more proteins that bind iron, transport iron, or store iron, or a combination thereof. Increased iron uptake and/or storage by expression of such proteins not only, increases contrast for visualization and detection of a tumor or tissue in which the virus accumulates, but also depletes iron from the tumor environment. Iron depletion from the tumor environment removes a vital nutrient from the tumors, thereby deregulating iron hemostasis in tumor cells and delaying tumor progression and/or killing the tumor.

[0253] Additionally, iron, or other labeled metals, can be administered to a tumor-bearing subject, either alone, or in a conjugated form. An iron conjugate can include, for example, iron conjugated to an imaging moiety or a therapeutic agent. In some cases, the imaging moiety and therapeutic agent are the same, e.g., a radionuclide. Internalization of iron in the tumor, wound, area of inflammation or infection allows the internalization of iron alone, a supplemental imaging moiety, or a therapeutic agent (which can deliver cytotoxicity specifically to tumor cells or deliver the therapeutic agent for treatment of the wound, area of inflammation or infection). These methods can be combined with any of the other methods provided herein.

[0254] The administered virus also can be modified to stimulate humoral and/or cellular immune response in the subject, such as the induction of cytotoxic T lymphocytes responses. For example, the virus can provide prophylactic and therapeutic effects against a tumor infected by the virus or other infectious diseases, by rejection of cells from tumors or lesions using viruses that express immunoreactive antigens (Earl et al., Science 234: 728-831 (1986); Lathe et al., Nature (London) 32: 878-880 (1987)), cellular tumor-associated antigens (Bernards et al., Proc. Natl. Acad. Sci. USA 84: 6854-6858 (1987); Estin et al., Proc. Natl. Acad. Sci. USA 85: 1052-1056 (1988); Kantor et al., J. Natl. Cancer Inst. 84: 1084-1091 (1992); Roth et al., Proc. Natl. Acad. Sci. USA 93: 4781-4786 (1996)) and/or cytokines (e.g., IL-2, IL-12), costimulatory molecules (B7-1, B7-2) (Rao et al., J. Immunol. 156: 3357-3365 (1996); Chamberlain et al., Cancer Res. 56: 2832-2836 (1996); Oertli et al., J. Gen. Virol. 77: 3121-3125 (1996); Qin and Chatterjee, Human Gene Ther. 7: 1853-1860 (1996); McAneny et al., Ann. Surg. Oncol. 3: 495-500 (1996)), or other therapeutic proteins.

[0255] For example, the viruses provided herein can be modified to express one or more antigens. Sustained release of the antigen can result in an immune response by the viral-infected host, in which the host can develop antibodies against the antigen and/or the host can develop an immune response against cells expressing the antigen. Exemplary antigens include, but are not limited to, tumor specific antigens, tumor-associated antigens, tissue-specific antigens, bacterial antigens, viral antigens, yeast antigens, fungal antigens, protozoan antigens, parasite antigens and mitogens. Superantigens are antigens that can activate a large immune response, often brought about by a large response of T cells. A variety of superantigens are known in the art including, but not limited to, diphtheria toxin, staphylococcal enterotoxins (SEA, SEB, SEC1, SEC2, SED, SEE and SEH), Toxic Shock Syndrome Toxin 1, Exfoliating Toxins (EXft), Streptococcal Pyrogenic Exotoxin A, B and C(SPE A, B and C), Mouse Mammary Tumor Virus proteins (MMTV), Streptococcal M proteins, Clostridial Perfringens Enterotoxin (CPET), Listeria monocytogenes antigen p60, and mycoplasma arthritis superantigens.

[0256] Since many superantigens also are toxins, if expression of a virus of reduced toxicity is desired, the superantigen can be modified to retain at least some of its superantigenicity while reducing its toxicity, resulting in a compound such as a toxoid. A variety of recombinant superantigens and toxoids of superantigens are known in the art, and can readily be expressed in the viruses provided herein. Exemplary toxoids include toxoids of diphtheria toxin, as exemplified in U.S. Pat. No. 6,455,673 and toxoids of Staphylococcal enterotoxins, as exemplified in U.S. Pat. Pub. No. 2003-0009015.

[0257] III. Modifications to Alter Attenuation of the Viruses

[0258] Viruses provided herein can be further attenuated by addition, deletion and/or modification of nucleic acid in the viral genome. In one example, the virus is attenuated by addition of heterologous nucleic acid that contains an open reading frame that encodes one or more gene products (e.g. a diagnostic gene product or a therapeutic gene product as described above). In another example, the virus is attenuated by modification of heterologous nucleic acid that contains an open reading frame that encodes one or more gene products. In a further example, the heterologous nucleic acid is modified by increasing the length of the open reading frame, removal of all or part of the open reading frame or replacement of all or part of the open reading frame. Such modifications can affect viral toxicity by disruption of one or more viral genes or by increasing or decreasing the transcriptional and/or translational load on the virus (see, e.g., International Patent Publication No. WO 2008/100292).

[0259] In another example, the virus can be attenuated by modification or replacement of one or more promoters contained in the virus. Such promoters can be replaced by stronger or weaker promoters, where replacement results in a change in the attenuation of the virus. In one example, a promoter of a virus provided herein is replaced with a natural promoter. In one example, a promoter of a virus provided herein is replaced with a synthetic promoter. Exemplary promoters that can replace a promoter contained in a virus can be a viral promoter, such as a vaccinia viral promoter, and can include a vaccinia early, intermediate, early/late or late promoter. Additional exemplary viral promoters are provided herein and known in the art and can be used to replace a promoter contained in a virus.

[0260] In another example, the virus can be attenuated by removal or all or a portion of a heterologous nucleic acid molecule contained in the virus. The portion of the heterologous nucleic acid that is removed can be 1, 2, 3, 4, 5 or more, 10 or more, 15 or more, 20 or more, 50 or more, 100 or more, 1000 or more, 5000 or more nucleotide bases. In another example, the virus is attenuated by modification of a heterologous nucleic acid contained in the virus by removal or all or a portion of a first heterologous nucleic acid molecule and replacement by a second heterologous nucleic acid molecule, where replacement changes the level of attenuation of the virus. The second heterologous nucleic acid molecule can contain a sequence of nucleotides that encodes a protein or can be a non-coding nucleic acid molecule. In some examples, the second heterologous nucleic acid molecule contains an open reading frame operably linked to a promoter. The second heterologous nucleic acid molecule can contain one or more open reading frames or one or more promoters. Further, the one or more promoters of the second heterologous nucleic acid molecule can be one or more stronger promoters or one or more weaker promoters, or can be a combination or both.

[0261] Attenuated vaccinia viruses are known in the art and are described, for example, in U.S. Patent Pub. Nos. US 2005-0031643 now U.S. Pat. Nos. 7,588,767, 7,588,771 and 7,662,398, US 2008-0193373, US 2009-0098529, US 2009-0053244, US 2009-0155287, US 2009-0081639, US 2009-0117034 and US 2009-0136917, and International Patent Pub. Nos. WO 2005/047458, WO 2008/100292 and WO 2008/150496.

[0262] Viruses provided herein also can contain a modification that alters its infectivity or resistance to neutralizing antibodies. In one non-limiting example deletion of the A35R gene in an vaccinia LIVP strain can decrease the infectivity of the virus. In some examples, the viruses provided herein can be modified to contain a deletion of the A35R gene. Exemplary methods for generating such viruses are described in PCT Publication No. WO2008/100292, which describes vaccinia LIVP viruses GLV-1j87, GLV-1j88 and GLV-1j89, which contain deletion of the A35R gene.

[0263] In another non-limiting example, replacement of viral coat proteins (e.g., A34R, which encodes a viral coat glycoprotein) with coat proteins from either more virulent or less virulent virus strains can increase or decrease the clearance of the virus from the subject. In one example, the A34R gene in a vaccinia LIVP strain can be replaced with the A34R gene from vaccinia IHD-J strain. Such replacement can increase the extracellular enveloped virus (EEV) form of vaccinia virus and can increase the resistance of the virus to neutralizing antibodies.

[0264] b. Exemplary Modified or Recombinant Viruses

[0265] Exemplary modified vaccinia viruses provided herein are those derived from the Lister strain, and in particular the attenuated Lister strain LIVP. Recombinant LIVP viruses have been generated and are known in the art. The modified LIVP viruses can be modified by insertion, deletion or amino acid replacement of heterologous nucleic acid compared to an LIVP strain having a genome set forth in any one of SEQ ID NOS: 1-8, or having a genome that exhibits at least 97%, 98%, 99% or more sequence identity to any of SEQ ID NOS: 1-8. Table 4 sets forth exemplary viruses, the reference or partental LIVP (e.g. LIVP set forth in SEQ ID NO:1 or GLV-1h68 set forth in SEQ ID NO:9) and the resulting genotype. The exemplary modifications of the Lister strain can be adapted to other vaccinia viruses (e.g., Western Reserve (WR), Copenhagen, Tashkent, Tian Tan, Lister, Wyeth, IHD-J, and IHD-W, Brighton, Ankara, MVA, Dairen I, LIPV, LC16M8, LC16MO, LIVP, WR 65-16, Connaught, New York City Board of Health).

TABLE 4
Recombinant Viruses

| Virus | Parent | Genotype | | | | |
|---|---|---|---|---|---|---|
| Name | Virus | F14.5L | J2R | A56R | A34R | A35R |
| GLV-1h68 | LIVP | (PSE/L)Ruc- | (PSE/L)rTrfR- | (P11)gusA | wt | wt |
| | | GFP | (P7.5)lacZ | | | |
| GLV-1i69 | GLV-1h68 | (PSE/L)Ruc- | (PSE/L)rTrfR- | (P11)gusA | A34R | wt |
| | | GFP | (P7.5)lacZ | | from | |
| | | | | | IHD-J | |
| GLV-1h70 | GLV-1h68 | (PSE/L)Ruc- | (PSE/L)rTrfR- | ko | wt | wt |
| | | GFP | (P7.5)lacZ | | | |
| GLV-1h71 | GLV-1h68 | ko | (PSE/L)rTrfR- | (P11)gusA | wt | wt |
| | | | (P7.5)lacZ | | | |
| GLV-1h72 | GLV-1h68 | (PSE/L)Ruc- | ko | (P11)gusA | wt | wt |
| | | GFP | | | | |
| GLV-1h73 | GLV-1h70 | ko | (PSE/L)rTrfR- | ko | wt | wt |
| | | | (P7.5)lacZ | | | |
| GLV-1h74 | GLV-1h73 | ko | ko | ko | wt | wt |
| GLV-1h76 | GLV-1h68 | (PSE/L)Ruc- | (PSE)GM-CSF | (P11)gusA | wt | wt |
| | | GFP | | | | |
| GLV-1h77 | GLV-1h68 | (PSE/L)Ruc- | (PSE/L)GM-CSF | (P11)gusA | wt | wt |
| | | GFP | | | | |
| GLV-1h78 | GLV-1h68 | (PSE/L)Ruc- | (PSL)GM-CSF | (P11)gusA | wt | wt |
| | | GFP | | | | |
| GLV-1h79 | GLV-1h68 | (PSE/L)Ruc- | (PSE/L)mMCP-1 | (P11)gusA | wt | wt |
| | | GFP | | | | |
| GLV-1h80 | GLV-1h68 | (PSE/L)Ruc- | (PSL)mMCP-1 | (P11)gusA | wt | wt |
| | | GFP | | | | |
| GLV-1h81 | GLV-1h68 | (PSE/L)Ruc- | (PSE/L)rTrfR- | (PSE/L)hk5 | wt | wt |
| | | GFP | (P7.5)lacZ | | | |
| GLV-1h82 | GLV-1h22 | (PSE/L)Ruc- | (PSE/L)TrfR- | (PSE/L)ftn | wt | wt |
| | | GFP | (P7.5)lacZ | | | |
| GLV-1h83 | GLV-1h68 | (PSE/L)Ruc- | (PSE/L)rTrfR- | (PSE/L)ftn | wt | wt |
| | | GFP | (P7.5)lacZ | | | |
| GLV-1h84 | GLV-1h68 | ko | (PSE/L)CBG99- | ko | wt | wt |
| | | | mRFP1 | | | |
| GLV-1h85 | GLV-1h72 | ko | ko | (P11)gusA | wt | wt |
| GLV-1h86 | GLV-1h72 | (PSE/L)Ruc- | ko | ko | wt | wt |
| | | GFP | | | | |
| GLV-1j87 | GLV-1h68 | (PSE/L)Ruc- | (PSE/L)rTrfR- | (P11)gusA | wt | ko |
| | | GFP | (P7.5)lacZ | | | |
| GLV-1j88 | GLV-1h73 | ko | (PSE/L)rTrfR- | ko | wt | ko |
| | | | (P7.5)lacZ | | | |
| GLV-1j89 | GLV-1h74 | ko | ko | ko | wt | ko |
| GLV-1h90 | GLV-1h68 | (PSE/L)Ruc- | (PSE/L)rTrfR- | (PSE)sIL- | wt | wt |
| | | GFP | (P7.5)lacZ | 6R/IL-6 | | |
| GLV-1h91 | GLV-1h68 | (PSE/L)Ruc- | (PSE/L)rTrfR- | (PSE/L)sIL- | wt | wt |
| | | GFP | (P7.5)lacZ | 6R/IL-6 | | |
| GLV-1h92 | GLV-1h68 | (PSE/L)Ruc- | (PSE/L)rTrfR- | (PSL)sIL- | wt | wt |
| | | GFP | (P7.5)lacZ | 6R/IL-6 | | |
| GLV-1h93 | GLV-1h68 | (PSE/L)Ruc- | (PSE/L)rTrfR- | (PSE)FCU1 | wt | wt |
| | | GFP | (P7.5)lacZ | | | |
| GLV-1h94 | GLV-1h68 | (PSE/L)Ruc- | (PSE/L)rTrfR- | (PSEL)FCU1 | wt | wt |
| | | GFP | (P7.5)lacZ | | | |
| GLV-1h95 | GLV-1h68 | (PSE/L)Ruc- | (PSE/L)rTrfR- | (PSL)FCU1 | wt | wt |
| | | GFP | (P7.5)lacZ | | | |
| GLV-1h96 | GLV-1h68 | (PSE)IL-24 | (PSE/L)rTrfR- | (P11)gusA | wt | wt |
| | | | (P7.5)lacZ | | | |
| GLV-1h97 | GLV-1h68 | (PSEL)IL-24 | (PSE/L)rTrfR- | (P11)gusA | wt | wt |
| | | | (P7.5)lacZ | | | |
| GLV-1h98 | GLV-1h68 | (PSL)IL-24 | (PSE/L)rTrfR- | (P11)gusA | wt | wt |
| | | | (P7.5)lacZ | | | |
| GLV-1h99 | GLV-1h68 | (PSE)hNET | (PSE/L)rTrfR- | (P11)gusA | wt | wt |
| | | | (P7.5)lacZ | | | |
| GLV- | GLV-1h68 | (PSE/L)Ruc- | (PSE)hNET | (P11)gusA | wt | wt |
| 1h100 | | GFP | | | | |
| GLV- | GLV-1h68 | (PSE/L)Ruc- | (PSL)hNET | (P11)gusA | wt | wt |
| 1h101 | | GFP | | | | |
| GLV- | GLV-1h68 | (PSE/L)Ruc- | (PSE/L)rTrfR- | (PSE)hDMT | wt | wt |
| 1h102 | | GFP | (P7.5)lacZ | | | |
| GLV- | GLV-1h68 | (PSE/L)Ruc- | (PSL)hMCP1 | (P11)gusA | wt | wt |
| 1h103 | | GFP | | | | |
| GLV- | GLV-1h68 | (PSE/L)Ruc- | (PSE)tTF-RGD | (P11)gusA | wt | wt |
| 1h104 | | GFP | | | | |
| GLV- | GLV-1h68 | (PSE/L)Ruc- | (PSE/L)tTF- | (P11)gusA | wt | wt |
| 1h105 | | GFP | RGD | | | |
| GLV- | GLV-1h68 | (PSE/L)Ruc- | (PSL)tTF-RGD | (P11)gusA | wt | wt |
| 1h106 | | GFP | | | | |
| GLV- | GLV-1h68 | (PSE/L)Ruc- | (PSE)G6-FLAG | (P11)gusA | wt | wt |
| 1h107 | | GFP | | | | |
| GLV- | GLV-1h68 | (PSE/L)Ruc- | (PSE/L)G6- | (P11)gusA | wt | wt |
| 1h108 | | GFP | FLAG | | | |
| GLV- | GLV-1h68 | (PSE/L)Ruc- | (PSL)G6-FLAG | (P11)gusA | wt | wt |
| 1h109 | | GFP | | | | |
| GLV- | GLV-1h68 | (PSE/L)Ruc- | (PSE/L)rTrfR- | (PSE)bfr | wt | wt |
| 1h110 | | GFP | (P7.5)lacZ | | | |
| GLV- | GLV-1h68 | (PSE/L)Ruc- | (PSE/L)rTrfR- | (PSE/L)bfr | wt | wt |
| 1h111 | | GFP | (P7.5)lacZ | | | |
| GLV- | GLV-1h68 | (PSE/L)Ruc- | (PSE/L)rTrfR- | (PSL)bfr | wt | wt |
| 1h112 | | GFP | (P7.5)lacZ | | | |
| GLV- | GLV-1h68 | (PSE/L)Ruc- | (PSE/L)rTrfR- | (PSE/L)bfrₒₚₜ | wt | wt |
| 1h113 | | GFP | (P7.5)lacZ | | | |
| GLV- | GLV-1h68 | (PSE/L)Ruc- | (PSE/L)rTrfR- | (PSE)mtr | wt | wt |
| 1h114 | | GFP | (P7.5)lacZ | | | |
| GLV- | GLV-1h68 | (PSE/L)Ruc- | (PSE/L)rTrfR- | (PSE/L)mtr | wt | wt |
| 1h115 | | GFP | (P7.5)lacZ | | | |
| GLV- | GLV-1h68 | (PSE/L)Ruc- | (PSE)mMnSOD | (P11)gusA | wt | wt |
| 1h116 | | GFP | | | | |
| GLV- | GLV-1h68 | (PSE/L)Ruc- | (PSE/L)mMnSOD | (P11)gusA | wt | wt |
| 1h117 | | GFP | | | | |
| GLV- | GLV-1h68 | (PSE/L)Ruc- | (PSL)mMnSOD | (P11)gusA | wt | wt |
| 1h118 | | GFP | | | | |
| GLV- | GLV-1h68 | (PSE/L)Ruc- | (PSE)mIP-10 | (P11)gusA | wt | wt |
| 1h119 | | GFP | | | | |
| GLV- | GLV-1h68 | (PSE/L)Ruc- | (PSE/L)mIP-10 | (P11)gusA | wt | wt |
| 1h120 | | GFP | | | | |
| GLV- | GLV-1h68 | (PSE/L)Ruc- | (PSL)mIP-10 | (P11)gusA | wt | wt |
| 1h121 | | GFP | | | | |
| GLV- | GLV-1h68 | (PSE/L)Ruc- | (PSE)mLIGHT | (P11)gusA | wt | wt |
| 1h122 | | GFP | | | | |
| GLV- | GLV-1h68 | (PSE/L)Ruc- | (PSE/L)mLIGHT | (P11)gusA | wt | wt |
| 1h123 | | GFP | | | | |
| GLV- | GLV-1h68 | (PSE/L)Ruc- | (PSL)mLIGHT | (P11)gusA | wt | wt |
| 1h124 | | GFP | | | | |
| GLV- | GLV-1h68 | (PSE/L)Ruc- | (PSE)CBP | (P11)gusA | wt | wt |
| 1h125 | | GFP | | | | |
| GLV- | GLV-1h68 | (PSE/L)Ruc- | (PSE/L)CBP | (P11)gusA | wt | wt |
| 1h126 | | GFP | | | | |
| GLV- | GLV-1h68 | (PSE/L)Ruc- | (PSL)CBP | (P11)gusA | wt | wt |
| 1h127 | | GFP | | | | |
| GLV- | GLV-1h68 | (PSE/L)Ruc- | (PSE)P60 | (P11)gusA | wt | wt |
| 1h128 | | GFP | | | | |
| GLV-h129 | GLV-1h68 | (PSE/L)Ruc- | (PSE/L)P60 | (P11)gusA | wt | wt |
| | | GFP | | | | |
| GLV- | GLV-1h68 | (PSE/L)Ruc- | (PSL)P60 | (P11)gusA | wt | wt |
| 1h130 | | GFP | | | | |
| GLV- | GLV-1h68 | (PSE/L)Ruc- | (PSE)hFLH | (P11)gusA | wt | wt |
| 1h131 | | GFP | | | | |
| GLV- | GLV-1h68 | (PSE/L)Ruc- | (PSE/L)hFLH | (P11)gusA | wt | wt |
| 1h132 | | GFP | | | | |
| GLV- | GLV-1h68 | (PSE/L)Ruc- | (PSL)hFLH | (P11)gusA | wt | wt |
| 1h133 | | GFP | | | | |
| GLV- | GLV-1h68 | (PSE/L)CBG9 | (PSE/L)rTrfR- | (P11)gusA | wt | wt |
| 1h134 | | 9-mRFP1 | (P7.5)lacZ | | | |
| GLV- | GLV-1h68 | wt | (PSE/L)rTrfR- | (P11)gusA | wt | wt |
| 1e135 | | | (P7.5)lacZ | | | |
| GLV- | GLV-1h68 | (PSE/L)Ruc- | (PSE)PEDF | (P11)gusA | wt | wt |
| 1h136 | | GFP | | | | |
| GLV- | GLV-1h68 | (PSE/L)Ruc- | (PSE/L)PEDF | (P11)gusA | wt | wt |
| 1h137 | | GFP | | | | |
| GLV- | GLV-1h68 | (PSE/L)Ruc- | (PSL)PEDF | (P11)gusA | wt | wt |
| 1h138 | | GFP | | | | |
| GLV- | GLV-1h68 | (PSE/L)Ruc- | (PSE/L)rTrfR- | (PSE)hNET | wt | wt |
| 1h139 | | GFP | (P7.5)lacZ | | | |
| GLV- | GLV-1h68 | (PSE/L)Ruc- | (PSE)CYP11B1 | (P11)gusA | wt | wt |
| 1h140 | | GFP | | | | |
| GLV- | GLV-1h68 | (PSE/L)Ruc- | (PSE/L)CYP11B1 | (P11)gusA | wt | wt |
| 1h141 | | GFP | | | | |
| GLV- | GLV-1h68 | (PSE/L)Ruc- | (PSL)CYP11B1 | (P11)gusA | wt | wt |
| 1h142 | | GFP | | | | |
| GLV- | GLV-1h68 | (PSE/L)Ruc- | (PSE)CYP11B2 | (P11)gusA | wt | wt |
| 1h143 | | GFP | | | | |
| GLV- | GLV-1h68 | (PSE/L)Ruc- | (PSE/L)CYP11B2 | (P11)gusA | wt | wt |
| 1h144 | | GFP | | | | |
| GLV- | GLV-1h68 | (PSE/L)Ruc- | (PSL)CYP11B2 | (P11)gusA | wt | wt |
| 1h145 | | GFP | | | | |
| GLV- | GLV- | (PSE/L)Ruc- | (PSE)hNET | (PSE)IL-24 | wt | wt |
| 1h146 | 1h100 | GFP | | | | |
| GLV- | GLV-1h68 | (PSE/L)Ruc- | (PSE)HACE1 | (P11)gusA | wt | wt |
| 1h147 | | GFP | | | | |
| GLV- | GLV-1h68 | (PSE/L)Ruc- | (PSE/L)HACE1 | (P11)gusA | wt | wt |
| 1h148 | | GFP | | | | |
| GLV- | GLV-1h68 | (PSE/L)Ruc- | (PSL)HACE1 | (P11)gusA | wt | wt |
| 1h149 | | GFP | | | | |
| GLV- | GLV- | (PSE/L)Ruc- | (PSL)hNET | (PSE)IL-24 | wt | wt |
| 1h150 | 1h101 | GFP | | | | |
| GLV- | GLV-1h68 | (PSE/L) Ruc- | (PSE/L)TfR- | (PSE)hNIS | wt | wt |
| 1h151 | | GFP | (P7.5)lacZ | | | |
| GLV- | GLV-1h68 | (PSE/L) Ruc- | (PSE/L)TfR- | (PSE)hNISa | wt | wt |
| 1h153 | | GFP | (P7.5)lacZ | | | |
| GLV- | GLV-1h22 | (P_{SE/L}) Ruc- | (P_{SE/L})TfR- | (P_{SE/L})bfrₒₚₜ. | wt | wt |
| 1h154 | | GFP | (P_{7.5})lacZ | | | |
| GLV- | GLV-1h22 | (PSE/L) Ruc- | (PSE/L)TfR- | (PSE/L)hFH | wt | wt |
| 1h155 | | GFP | (P7.5)lacZ | | | |
| GLV- | GLV- | (PSE/L) Ruc- | (PSE/L)mtr | (PSE/L)bfrₒₚₜ | wt | wt |
| 1h156 | 1h113 | GFP | | | | |
| GLV- | GLV-1h68 | (PSE/L) Ruc- | (PSE/L)mtr | (PSE/L)hFH | wt | wt |
| 1h157 | | GFP | | | | |
| GLV- | GLV-1h68 | (PSE/L) Ruc- | (PSE/L)TfR- | (PSE/L)G6- | wt | wt |
| 1h158 | | GFP | (P7.5)lacZ | scAb | | |
| GLV- | GLV-1h68 | (PSE/L) Ruc- | (PSE/L)TfR- | (PSL)G6-scAb | wt | wt |
| 1h159 | | GFP | (P7.5)lacZ | | | |
| GLV- | GLV-1h68 | (PSE/L)Ruc- | (PSEL)luxAB | (P11)gusA | wt | wt |
| 1h160 | | GFP | | | | |
| GLV- | GLV-1h68 | (PSE/L)Ruc- | (PSE/L)TfR- | (PSEL)luxCD | wt | wt |
| 1h161 | | GFP | (P7.5)lacZ | | | |
| GLV- | GLV-1h68 | (PSEL)luxE | (PSE/L)rTrfR- | (P11)gusA | wt | wt |
| 1h162 | | | (P7.5)lacZ | | | |
| GLV- | GLV- | (PSE/L)Ruc- | (PSE)hNET | (PSE/L)G6- | wt | wt |
| 1h163 | 1h100 | GFP | | scAb | | |
| GLV- | GLV- | (PSE/L)Ruc- | (PSE)hNET | (PSL)G6-scAb | wt | wt |
| 1h164 | 1h100 | GFP | | | | |
| GLV- | GLV-1h68 | (PSE/L)Ruc- | (PSE)nAG | (P11)gusA | wt | wt |
| 1h165 | | GFP | | | | |
| GLV- | GLV-1h68 | (PSE/L)Ruc- | (PSEL)NAG | (P11)gusA | wt | wt |
| 1h166 | | GFP | | | | |
| GLV- | GLV-1h68 | (PSE/L)Ruc- | (PSL)nAG | (P11)gusA | wt | wt |
| 1h167 | | GFP | | | | |
| GLV- | GLV-1h68 | (PSE/L)Ruc- | (PSE)RLN | (P11)gusA | wt | wt |
| 1h168 | | GFP | | | | |
| GLV- | GLV-1h68 | (PSE/L)Ruc- | (PSEL)RLN | (P11)gusA | wt | wt |
| 1h169 | | GFP | | | | |
| GLV- | GLV-1h68 | (PSE/L)Ruc- | (PSL)RLN | (P11)gusA | wt | wt |
| 1h170 | | GFP | | | | |
| GLV- | GLV-1h68 | (PSE/L)Ruc- | (PSE)NM23A | (P11)gusA | wt | wt |
| 1h171 | | GFP | | | | |
| GLV- | GLV-1h68 | (PSE/L)Ruc- | (PSEL)NM23A | (P11)gusA | wt | wt |
| 1h172 | | GFP | | | | |
| GLV- | GLV-1h68 | (PSE/L)Ruc- | (PSL)NM23 | (P11)gusA | wt | wt |
| 1h173 | | GFP | | | | |
| GLV- | GLV-1h68 | (PSE/L)Ruc- | (PSE)NPPA1 | (P11)gusA | wt | wt |
| 1h174 | | GFP | | | | |
| GLV- | GLV-1h68 | (PSE/L)Ruc- | (PSEL)NPPA1 | (P11)gusA | wt | wt |
| 1h175 | | GFP | | | | |
| GLV- | GLV-1h68 | (PSE/L)Ruc- | (PSL)NPPA1 | (P11)gusA | wt | wt |
| 1h176 | | GFP | | | | |
| GLV- | GLV-1h68 | (PSE/L)Ruc- | (PSE)STAT1α | (P11)gusA | wt | wt |
| 1h177 | | GFP | | | | |
| GLV- | GLV-1h68 | (PSE/L)Ruc- | (PSEL)STAT1α | (P11)gusA | wt | wt |
| 1h178 | | GFP | | | | |
| GLV- | GLV-1h68 | (PSE/L)Ruc- | (PSL)STAT1α | (P11)gusA | wt | wt |
| 1h179 | | GFP | | | | |
| GLV- | GLV-1h68 | (PSE/L)Ruc- | (PSE)CPG2 | (P11)gusA | wt | wt |
| 1h180 | | GFP | | | | |
| GLV- | GLV-1h68 | (PSE/L)Ruc- | (PSEL)CPG2 | (P11)gusA | wt | wt |
| 1h181 | | GFP | | | | |
| GLV- | GLV-1h68 | (PSE/L)Ruc- | (PSL)CPG2 | (P11)gusA | wt | wt |
| 1h182 | | GFP | | | | |
| GLV- | GLV-1h68 | (PSE/L)Ruc- | (PSE)Ecad | (P11)gusA | wt | wt |
| 1h183 | | GFP | | | | |
| GLV- | GLV-1h68 | (PSE/L) Ruc- | (PSE/L)TfR- | (PSE)magA | wt | wt |
| 1h184 | | GFP | (P7.5)lacZ | | | |
| GLV- | GLV-1h68 | (PSE/L)Ruc- | (PSL)Ecad | (P11)gusA | wt | wt |
| 1h185 | | GFP | | | | |
| GLV- | GLV-1h68 | (PSE/L) Ruc- | (PSE/L)TfR- | (PSEL)FTL | wt | wt |
| 1h186 | | GFP | (P7.5)lacZ | 498-499InsTC | | |
| GLV- | GLV-1h68 | (PSE/L) Ruc- | (PSE/L)TfR- | (PSEL)FTL | wt | wt |
| 1h187 | | GFP | (P7.5)lacZ | | | |
| GLV- | GLV-1h68 | (PSE/L) Ruc- | (PSE/L)TfR- | (PSE)FUKW | wt | wt |
| 1h188 | | GFP | (P7.5)lacZ | | | |
| GLV- | GLV-1h68 | (PSE/L) Ruc- | (PSE/L)TfR- | (PSEL)FUKW | wt | wt |
| 1h189 | | GFP | (P7.5)lacZ | | | |
| GLV- | GLV-1h68 | (PSE/L) Ruc- | (PSE/L)TfR- | (PSL)FUKW | wt | wt |
| 1h190 | | GFP | (P7.5)lacZ | | | |
| GLV- | GLV-1h68 | (PSE/L)Ruc- | (PSE)STAT1β | (P11)gusA | wt | wt |
| 1h191 | | GFP | | | | |
| GLV- | GLV-1h68 | (PSE/L)Ruc- | (PSEL)STAT1β | (P11)gusA | wt | wt |
| 1h192 | | GFP | | | | |
| GLV- | GLV-1h68 | (PSE/L)Ruc- | (PSL)STAT1β | (P11)gusA | wt | wt |
| 1h193 | | GFP | | | | |
| GLV- | GLV- | (PSE)luxE | (PSE/L)TfR- | (PSEL)luxCD | wt | wt |
| 1h194 | 1h161 | | (P7.5)lacZ | | | |
| GLV- | GLV- | (PSE/L)Ruc- | (PSE)luxAB | (PSEL)luxCD | wt | wt |
| 1h195 | 1h161 | GFP | | | | |
| GLV- | GLV-1h68 | (PSE/L)Ruc- | (PSE)181a | (P11)gusA | wt | wt |
| 1h196 | | GFP | | | | |
| GLV- | GLV-1h68 | | | | | |
| 1h197 | | | | | | |
| GLV- | GLV-1h68 | (PSE/L)Ruc- | (PSL)181a | (P11)gusA | wt | wt |
| 1h198 | | GFP | | | | |
| GLV- | GLV-1h68 | (PSE/L)Ruc- | (PSE)335 | (P11)gusA | wt | wt |
| 1h199 | | GFP | | | | |
| GLV- | GLV-1h68 | (PSE/L)Ruc- | (PSL)335 | (P11)gusA | wt | wt |
| 1h201 | | GFP | | | | |
| GLV- | GLV-1h68 | | | | | |
| 1h202 | | | | | | |
| GLV- | GLV-1h68 | (PSE/L)Ruc- | (PSEL)126 | (P11)gusA | wt | wt |
| 1h203 | | GFP | | | | |
| GLV- | GLV-1h68 | | | | | |
| 1h204 | | | | | | |
| GLV- | GLV-1h68 | (PSE/L) Ruc- | (PSE/L)TfR- | (PSE)NANOG | wt | wt |
| 1h205 | | GFP | (P7.5)lacZ | | | |
| GLV- | GLV-1h68 | (PSE/L) Ruc- | (PSE/L)TfR- | (PSE)Oct4 | wt | wt |
| 1h208 | | GFP | (P7.5)lacZ | | | |
| GLV- | GLV-1h68 | (PSE/L)Ruc- | (P7.5E)hEPO | (P11)gusA | wt | wt |
| 1h210 | | GFP | | | | |
| GLV- | GLV-1h68 | (PSE/L)Ruc- | (PSE)hEPO | (P11)gusA | wt | wt |
| 1h211 | | GFP | | | | |
| GLV- | GLV-1h68 | (PSE/L)Ruc- | (PSEL)hEPO | (P11)gusA | wt | wt |
| 1h212 | | GFP | | | | |
| GLV- | GLV-1h68 | (PSE/L)Ruc- | (PSL)hEPO | (P11)gusA | wt | wt |
| 1h213 | | GFP | | | | |
| GLV- | GLV-1h68 | (PSE/L)Ruc- | (PSE)OspF | (P11)gusA | wt | wt |
| 1h214 | | GFP | | | | |
| GLV- | GLV-1h68 | (PSE/L)Ruc- | (PSE)OspG | (P11)gusA | wt | wt |
| 1h215 | | GFP | | | | |
| GLV- | GLV-1h68 | (PSE/L)Ruc- | (PSEL)OspG | (P11)gusA | wt | wt |
| 1h216 | | GFP | | | | |
| GLV- | GLV-1h68 | (PSE/L)Ruc- | (PSL)OspG | (P11)gusA | wt | wt |
| 1h217 | | GFP | | | | |
| GLV- | GLV-1h84 | ko | (PSE/L)CBG99- | (PSE)RLN | wt | wt |
| 1h218 | | | mRFP1 | | | |
| GLV- | GLV-1h84 | ko | (PSE/L)CBG99- | (PSEL)RLN | wt | wt |
| 1h219 | | | mRFP1 | | | |
| GLV- | GLV-1h84 | ko | (PSE/L)CBG99- | (PSL)RLN | wt | wt |
| 1h220 | | | mRFP1 | | | |
| GLV- | GLV- | (PSE)luxE | (PSEL)luxAB | (P11)gusA | wt | wt |
| 1h221 | 1h160 | | | | | |
| GLV- | GLV-1h68 | (PSE/L)Ruc- | (PSE)Ngn3 | (P11)gusA | wt | wt |
| 1h222 | | GFP | | | | |
| GLV- | GLV-1h68 | (PSE/L)Ruc- | (PSEL)Ngn3 | (P11)gusA | wt | wt |
| 1h223 | | GFP | | | | |
| GLV- | GLV-1h68 | (PSE/L)Ruc- | (PSL)Ngn3 | (P11)gusA | wt | wt |
| 1h224 | | GFP | | | | |
| GLV- | GLV-1h68 | (PSE/L)Ruc- | (PSE)hADH | (P11)gusA | wt | wt |
| 1h225 | | GFP | | | | |
| GLV- | GLV-1h68 | (PSE/L)Ruc- | (PSEL)hADH | (P11)gusA | wt | wt |
| 1h226 | | GFP | | | | |
| GLV- | GLV-1h68 | (PSE/L)Ruc- | (PSL)hADH | (P11)gusA | wt | wt |
| 1h227 | | GFP | | | | |
| GLV- | GLV- | (PSE)luxE | (PSE)luxAB | (PSEL)luxCD | wt | wt |
| 1h228 | 1h194 | | | | | |
| GLV- | GLV- | (PSEL)luxE | (PSE)luxAB | (PSEL)luxCD | wt | wt |
| 1h229 | 1h195 | | | | | |
| GLV- | GLV-1h68 | (PSE/L)Ruc- | (PSE)Myc-CTR1 | (P11)gusA | wt | wt |
| 1h230 | | GFP | | | | |
| GLV- | GLV-1h68 | (PSE/L)Ruc- | (PSL)Myc-CTR1 | (P11)gusA | wt | wt |
| 1h231 | | GFP | | | | |
| GLV- | GLV-1h68 | (PSE/L)Ruc- | (PSE)CTR1 | (P11)gusA | wt | wt |
| 1h232 | | GFP | | | | |
| GLV- | GLV-1h68 | (PSE/L)Ruc- | (PSE)mPEDF | (P11)gusA | wt | wt |
| 1h233 | | GFP | | | | |
| GLV- | GLV-1h68 | (PSE/L)Ruc- | (PSEL)mPEDF | (P11)gusA | wt | wt |
| 1h234 | | GFP | | | | |
| GLV- | GLV-1h68 | (PSE/L)Ruc- | (PSL)mPEDF | (P11)gusA | wt | wt |
| 1h235 | | GFP | | | | |
| GLV- | GLV-1h73 | (PSE/L)Ruc- | rtfr(PE/L) | (PSE)WTCDC6 | wt | wt |
| 1h236 | | GFP | (P7.5)lacZ | | | |
| GLV- | GLV-1h73 | (PSE/L)Ruc- | rtfr(PE/L) | (PSE)MutCDC6 | wt | wt |
| 1h237 | | GFP | (P7.5)lacZ | | | |
| GLV- | GLV-1h68 | (PSE/L) Ruc- | (PSE/L)TfR- | (PSL)CBG99- | wt | wt |
| 1h238 | | GFP | (P7.5)lacZ | mRFP1 | | |
| GLV- | GLV-1h68 | (PSE/L)Ruc- | (PSE)GLAF-3 | (P11)gusA | wt | wt |
| 1h239 | | GFP | | | | |
| GLV- | GLV-1h68 | (PSE/L)Ruc- | (PSEL)GLAF-3 | (P11)gusA | wt | wt |
| 1h240 | | GFP | | | | |
| GLV- | GLV-1h68 | (PSE/L)Ruc- | (PSL)GLAF-3 | (P11)gusA | wt | wt |
| 1h241 | | GFP | | | | |
| GLV- | GLV-1h68 | (PSE/L)Ruc- | (PE))luxABCDE | (P11)gusA | wt | wt |
| 1h242 | | GFP | | | | |
| GLV- | GLV- | (PSE/L)Ruc- | (PE))luxABCDE | (PSE)frp | wt | wt |
| 1h243 | 1h242 | GFP | | | | |
| GLV- | GLV- | (PSE/L) Ruc- | (PSE)hNISa | (PSEL)FUKW | wt | wt |
| 1h244 | 1h189 | GFP | | | | |
| GLV- | GLV- | (PSE/L) Ruc- | (PSEL)hNISa | (PSEL)FUKW | wt | wt |
| 1h245 | 1h189 | GFP | | | | |
| GLV- | GLV- | (PSE/L) Ruc- | (PSL)hNISa | (PSEL)FUKW | wt | wt |
| 1h246 | 1h189 | GFP | | | | |
| GLV- | GLV-1h68 | (PSE/L) Ruc- | (PSE/L)TfR- | (PSE)IFP | wt | wt |
| 1h247 | | GFP | (P7.5)lacZ | | | |
| GLV- | GLV-1h68 | (PSE/L) Ruc- | (PSE/L)TfR- | (PSEL)IFP | wt | wt |
| 1h248 | | GFP | (P7.5)lacZ | | | |
| GLV- | GLV-1h68 | (PSE/L) Ruc- | (PSE/L)TfR- | (PSL)IFP | wt | wt |
| 1h249 | | GFP | (P7.5)lacZ | | | |
| GLV- | GLV- | (PSE/L) Ruc- | (PSE/L)TfR- | (PSL)FUKW | wt | wt |
| 1h250 | 1h190 | GFP | (P7.5)lacZ | | | |
| GLV- | GLV-1h68 | (PSE)hNISa | (PSE/L)rTrfR- | (P11)gusA | wt | wt |
| 1h251 | | | (P7.5)lacZ | | | |
| GLV- | GLV-1h68 | (PSE/L)Ruc- | (PSE)hNISa | (P11)gusA | wt | wt |
| 1h252 | | GFP | | | | |
| GLV- | GLV-1h71 | ko | (PSE/L)TfR- | (PSE)FUKW | wt | wt |
| 1h253 | | | (P7.5)lacZ | | | |
| GLV- | GLV-1h71 | ko | (PSE/L)TfR- | (PSL)FUKW | wt | wt |
| 1h254 | | | (P7.5)lacZ | | | |
| GLV- | GLV-1h68 | (PSE/L)Ruc- | (PSE)hMMP9 | (P11)gusA | wt | wt |
| 1h255 | | GFP | | | | |
| GLV- | GLV-1h68 | (PSE/L)Ruc- | (PSL)hMMP9 | (P11)gusA | wt | wt |
| 1h256 | | GFP | | | | |
| GLV- | GLV-1h68 | (PSE/L) Ruc- | (PSE/L)TfR- | (PSE)mNeptune | wt | wt |
| 1h257 | | GFP | (P7.5)lacZ | | | |
| GLV- | GLV-1h68 | (PSE/L) Ruc- | (PSE/L)TfR- | (PSEL)mNeptune | wt | wt |
| 1h258 | | GFP | (P7.5)lacZ | | | |
| GLV- | GLV-1h68 | (PSE/L) Ruc- | (PSE/L)TfR- | (PSL)mNeptune | wt | wt |
| 1h259 | | GFP | (P7.5)lacZ | | | |
| GLV- | GLV-1h68 | (PSE)mNeptune | (PSE/L)rTrfR- | (P11)gusA | wt | wt |
| 1h260 | | | (P7.5)lacZ | | | |
| GLV- | GLV-1h68 | (PSEL)mNeptune | (PSE/L)rTrfR- | (P11)gusA | wt | wt |
| 1h261 | | | (P7.5)lacZ | | | |
| GLV- | GLV-1h68 | (PSL)mNeptune | (PSE/L)rTrfR- | (P11)gusA | wt | wt |
| 1h262 | | | (P7.5)lacZ | | | |
| GLV- | GLV- | (PSE)mNeptune | (PSE)hNET | (PSL)G6-scAb | wt | wt |
| 1h263 | 1h164 | | | | | |
| GLV- | GLV- | (PSEL)mNeptune | (PSE)hNET | (PSL)G6-scAb | wt | wt |
| 1h264 | 1h164 | | | | | |
| GLV- | GLV- | (PSL)mNeptune | (PSE)hNET | (PSL)G6-scAb | wt | wt |
| 1h265 | 1h164 | | | | | |
| GLV- | GLV- | (PSE/L) Ruc- | (PSE)AlstR | (PSEL)FUKW | wt | wt |
| 1h266 | 1h189 | GFP | | | | |
| GLV- | GLV- | (PSE/L) Ruc- | (PSEL)AlstR | (PSEL)FUKW | wt | wt |
| 1h267 | 1h189 | GFP | | | | |
| GLV- | GLV- | (PSE/L) Ruc- | (PSL)AlstR | (PSEL)FUKW | wt | wt |
| 1h268 | 1h189 | GFP | | | | |
| GLV- | GLV- | (PSE/L) Ruc- | (PSE)PEPR1 | (PSEL)FUKW | wt | wt |
| 1h269 | 1h189 | GFP | | | | |
| GLV- | GLV- | (PSE/L) Ruc- | (PSEL)PEPR1 | (PSEL)FUKW | wt | wt |
| 1h270 | 1h189 | GFP | | | | |
| GLV- | GLV- | (PSE/L) Ruc- | (PSL)PEPR1 | (PSEL)FUKW | wt | wt |
| 1h271 | 1h189 | GFP | | | | |
| GLV- | GLV- | (PSE/L) Ruc- | (PSE)LAT4 | (PSEL)FUKW | wt | wt |
| 1h272 | 1h189 | GFP | | | | |
| GLV- | GLV- | (PSE/L) Ruc- | (PSEL)LAT4 | (PSEL)FUKW | wt | wt |
| 1h273 | 1h189 | GFP | | | | |
| GLV- | GLV- | (PSE/L) Ruc- | (PSL)LAT4 | (PSEL)FUKW | wt | wt |
| 1h274 | 1h189 | GFP | | | | |
| GLV- | GLV- | (PSE/L) Ruc- | (PSE)Cyp51 | (PSEL)FUKW | wt | wt |
| 1h275 | 1h189 | GFP | | | | |
| GLV- | GLV- | (PSE/L) Ruc- | (PSEL)Cyp51 | (PSEL)FUKW | wt | wt |
| 1h276 | 1h189 | GFP | | | | |
| GLV- | GLV- | (PSE/L) Ruc- | (PSL)Cyp51 | (PSEL)FUKW | wt | wt |
| 1h277 | 1h189 | GFP | | | | |
| GLV- | GLV- | (PSE/L)Ruc- | (PSE)BMP4 | (PSEL)FUKW | wt | wt |
| 1h284 | 1h189 | GFP | | | | |
| GLV- | GLV- | (PSE/L)Ruc- | (PSEL)BMP4 | (PSEL)FUKW | wt | wt |
| 1h285 | 1h189 | GFP | | | | |
| GLV- | GLV- | (PSE/L)Ruc- | (PSL)BMP4 | (PSEL)FUKW | wt | wt |
| 1h286 | 1h189 | GFP | | | | |

[0266] For example, GLV-1h68 (also named RVGL21, SEQ ID NO: 9; described in U.S. Pat. Pub. No. 2005-0031643, now U.S. Pat. Nos. 7,588,767, 7,588,771, 7,662,398) is an attenuated virus of the LIVP strain containing a genome set forth in SEQ ID NO:1 that contains DNA insertions in gene loci F14.5L (also designated in LIVP as F3) gene locus, thymidine kinase (TK) gene locus, and hemagglutinin (HA) gene locus with expression cassettes encoding detectable marker proteins. Specifically, GLV-1h68 contains an expression cassette containing a Ruc-GFP cDNA molecule (a fusion of DNA encoding Renilla luciferase and DNA encoding GFP) under the control of a vaccinia synthetic early/late promoter P_{SEL} ((P_{SEL})Ruc-GFP) inserted into the F14.5L gene locus; an expression cassette containing a DNA molecule encoding beta-galactosidase under the control of the vaccinia early/late promoter P_{7.5k} ((P_{7.5k})LacZ) and DNA encoding a rat transferrin receptor positioned in the reverse orientation for transcription relative to the vaccinia synthetic early/late promoter P_{SEL} ((P_{SEL})rTrfR) inserted into the TK gene locus (the resulting virus does not express transferrin receptor protein since the DNA molecule encoding the protein is positioned in the reverse orientation for transcription relative to the promoter in the cassette); and an expression cassette containing a DNA molecule encoding β-glucuronidase under the control of the vaccinia late promoter P₁₁ₖ ((P₁₁ₖ)gusA) inserted into the HA gene locus.

[0267] Other recombinant LIVP viruses are derived from GLV-1h68 and contain heterologous DNA that encodes a gene product or products (see e.g. see e.g. U.S. Pub. Nos. US2003-0059400, US2003-0228261, US2007-0202572, US2007-0212727, US2009-0117034, US2009-0098529, US2009-0053244, US2009-0155287, US2009-0081639, US2009-0136917, US2009-0162288, US2010-0062016, US2010-0233078 and US2010-0196325; U.S. Pat. Nos. 7,588,767, 7,588,771, 7,662,398 and 7,754,221 and 7,763,420; and International Pub. No. WO 2009/139921). Exemplary of such recombinant viruses include those set forth in Table 4, including but not limited to, GLV-1h64 (set forth in SEQ ID NO:18); viruses that encode the far-red fluorescent protein TurboFP635 (scientific name “Katushka”; SEQ ID NO:24) from the sea anemone Entacmaea quadricolor, GLV-1h188 (SEQ ID NO: 19), GLV-1h189 (SEQ ID NO: 20), GLV-1h190 (SEQ ID NO: 21), GLV-1h253 (SEQ ID NO: 22), and GLV-1h254 (SEQ ID NO: 23).

[0268] Modified vaccinia viruses also include viruses that are modified by introduction of heterologous nucleic acid into an LIVP strain containing a genome set forth in any of SEQ ID NO: 2-8, or a genome that exhibits at least 97%, 98%, 99% or more sequence identity to any of SEQ ID NOS:2-8. For example, exemplary of a modified vaccinia virus is a virus that is modified by insertion, deletion or replacement of heterologous nucleic acid compared to an LIVP strain having a genome set forth in SEQ ID NO:2. Exemplary of such as strain is GLV-2b372, which contains TurboFP635 (Far-red fluorescent protein “katushka”; set forth in SEQ ID NO:24) under the control of the vaccinia synthetic early/late promoter at the TK locus. The genome of GLV-1b372 has the sequence of nucleotides set forth in SEQ ID NO:25.

[0269] c. Control of Heterologous Gene Expression

[0270] In some examples, the heterologous nucleic acid also can contain one or more regulatory sequences to regulate expression of an open reading frame encoding the heterologous RNA and/or protein. Suitable regulatory sequences which, for example, are functional in a mammalian host cell are well known in the art. Expression can also be influenced by one or more proteins or RNA molecules expressed by the virus. Gene regulatory elements, such as promoters and enhancers, possess cell type specific activities and can be activated by certain induction factors (e.g., hormones, growth factors, cytokines, cytostatic agents, irradiation, heat shock) via responsive elements. A controlled and restricted expression of these genes can be achieved using such regulatory elements as internal promoters to drive the expression of therapeutic genes in viral vector constructs.

[0271] For example, the one or more heterologous nucleic acid molecules can be operably linked to a promoter for expression of the heterologous RNA and/or protein. For example, a heterologous nucleic acid that is operably linked to a promoter is also called an expression cassette. Hence, viruses provided herein can have the ability to express one or more heterologous genes. Gene expression can include expression of a protein encoded by a gene and/or expression of an RNA molecule encoded by a gene. In some embodiments, the viruses provided herein can express exogenous genes at levels high enough that permit harvesting products of the exogenous genes from the tumor. Expression of heterologous genes can be controlled by a constitutive promoter, or by an inducible promoter. In other examples, organ or tissue-specific expression can be controlled by regulatory sequences. In order to achieve expression only in the target organ, for example, a tumor to be treated, the foreign nucleotide sequence can be linked to a tissue specific promoter and used for gene therapy. Such promoters are well known to those skilled in the art (see, e.g., Zimmermann et al., Neuron 12: 11-24 (1994); Vidal et al., EMBO J. 9: 833-840 (1990); Mayford et al., Cell 81: 891-904 (1995); and Pinkert et al., Genes & Dev. 1: 268-76 (1987)).

[0272] Exemplary promoters for the expression of heterologous genes are known in the art. The heterologous nucleic acid can be operatively linked to a native promoter or a heterologous promoter that is not native to the virus. Any suitable promoters, including synthetic and naturally-occurring and modified promoters, can be used. Exemplary promoters include synthetic promoters, including synthetic viral and animal promoters. Native promoter or heterologous promoters include, but are not limited to, viral promoters, such as vaccinia virus and adenovirus promoters.

[0273] In one example, the promoter is a poxvirus promoter, such as, for example, a vaccinia virus promoter. Vaccinia viral promoters for the expression of one or more heterologous genes can be synthetic or natural promoters, and include vaccinia early, intermediate, early/late and late promoters. Exemplary vaccinia viral promoters for controlling heterologous gene expression include, but are not limited to, P_{7.5k}, P₁₁ₖ, P_{SE}, P_{SEL}, P_{SL}, H5R, TK, P28, C11R, G8R, F17R, I3L, I8R, A1L, A2L, A3L, H1L, H3L, H5L, H6R, H8R, D1R, D4R, D5R, D9R, D11L, D12L, D13L, M1L, N2L, P4b or K1 promoters. Other viral promoters include, but are not limited to, adenovirus late promoter, Cowpox ATI promoter, or T7 promoter. Strong late promoters can be used to achieve high levels of expression of the heterologous genes. Early and intermediate-stage promoters also can be used. In one example, the promoters contain early and late promoter elements, for example, the vaccinia virus early/late promoter vaccinia late promoter P₁₁ₖ, a synthetic early/late vaccinia P_{SEL} promoter (Patel et al., (1988) Proc. Natl. Acad. Sci. USA 85: 9431-9435; Davison and Moss, (1989) J Mol Biol 210: 749-769; Davison et al. (1990) Nucleic Acids Res. 18: 4285-4286; Chakrabarti et al. (1997), BioTechniques 23: 1094-1097). The viruses provided herein can exhibit differences in characteristics, such as attenuation, as a result of using a stronger promoter versus a weaker promoter. For example, in vaccinia, synthetic early/late and late promoters are relatively strong promoters, whereas vaccinia synthetic early, P_{7.5k} early/late, P_{7.5k} early, and P₂₈ late promoters are relatively weaker promoters (see e.g., Chakrabarti et al. (1997) BioTechniques 23(6) 1094-1097). Combinations of different promoters can be used to express different gene products in the same virus or two different viruses.

[0274] As is known in the art, regulatory sequences can permit constitutive expression of the exogenous gene or can permit inducible expression of the exogenous gene. Further, the regulatory sequence can permit control of the level of expression of the exogenous gene. In some examples, such as gene product manufacture and harvesting, the regulatory sequence can result in constitutive, high levels of gene expression. In some examples, such as anti-(gene product) antibody harvesting, the regulatory sequence can result in constitutive, lower levels of gene expression. In tumor therapy examples, a therapeutic protein can be under the control of an internally inducible promoter or an externally inducible promoter.

[0275] Hence, expression of heterologous genes can be controlled by a constitutive promoter or by an inducible promoter. Inducible promoters can be used to provide tissue specific expression of the heterologous gene or can be inducible by the addition of a regulatory molecule to provide temporal specific induction of the promoter. In some examples, inducible expression can be under the control of cellular or other factors present in a tumor cell or present in a virus-infected tumor cell. In further examples, inducible expression can be under the control of an administrable substance, including IPTG, RU486 or other known induction compounds. Additional regulatory sequences can be used to control the expression of the one or more heterologous genes inserted the virus. Any of a variety of regulatory sequences are available to one skilled in the art according to known factors and design preferences.

[0276] d. Methods of Generating Modified Viruses

[0277] The viruses for use in the compositions herein can be modified by insertion, deletion, replacement or mutation as described herein, for example insertion or replacement of heterologous nucleic acid, using standard methodologies well known in the art for modifying viruses. Methods for modification include, for example, in vitro recombination techniques, synthetic methods, direct cloning, and in vivo recombination methods as described, for example, in Sambrook et al., Molecular Cloning: A Laboratory Manual, 2nd edition, Cold Spring Harbor Laboratory Press, cold Spring Harbor N.Y. (1989), and in the Examples disclosed herein.

[0278] For example, generation of recombinant viruses, including recombinant vaccinia virus, is well known in the art, and typically involves the generation of gene cassettes or transfer vectors using standard techniques in molecular biology (see, e.g., U.S. Pat. No. 7,588,767 and US2009-0053244-A1, which describe exemplary methods of generating recombinant LIVP vaccinia viruses). Such techniques include various nucleic acid manipulation techniques, nucleic acid transfer protocols, nucleic acid amplification protocols, and other molecular biology techniques known in the art.

[0279] For example, point mutations or small insertions or deletions can be introduced into a gene of interest through the use of oligonucleotide mediated site-directed mutagenesis. In another example, homologous recombination can be used to introduce a mutation in the nucleic acid sequence or insertion or deletion of a nucleic acid molecule into a target sequence of interest. In some examples, mutations, insertions or deletions of nucleic acid in a particular gene can be selected for using a positive or negative selection pressure. See, e.g., Current Techniques in Molecular Biology, (Ed. Ausubel, et al.).

[0280] Nucleic acid amplification protocols include, but are not limited to, the polymerase chain reaction (PCR), or amplification via viruses or organisms, such as, but not limited to, bacteria, yeast, insect or mammalian cells. Use of nucleic acid tools such as plasmids, vectors, promoters and other regulating sequences, are well known in the art for a large variety of viruses and cellular organisms.

[0281] Nucleic acid transfer protocols include calcium chloride transformation/transfection, electroporation, liposome mediated nucleic acid transfer, N-[1-(2,3-dioloyloxy)propyl]-N,N,N-trimethylammonium methylsulfate meditated transformation, and others. Further a large variety of nucleic acid tools are available from many different sources, including various commercial sources. One skilled in the art will be readily able to select the appropriate tools and methods for genetic modifications of any particular virus according to the knowledge in the art and design choice.

[0282] Hence, any of a variety of modifications can be readily accomplished using standard molecular biological methods known in the art. The modifications will typically be one or more truncations, deletions, mutations or insertions of the viral genome. In one example, the modification can be specifically directed to a particular sequence in the viral genome. The modifications can be directed to any of a variety of regions of the viral genome, including, but not limited to, a regulatory sequence, a gene-encoding sequence, an intergenic sequence, a sequence without a known role, or a non-essential region of the viral genome. Any of a variety of regions of viral genomes that are available for modification are readily known in the art for many viruses, including LIVP.

[0283] Heterologous nucleic acid molecules are typically inserted into the viral genome in an intergenic region or in a locus that encodes a nonessential viral gene product. Insertion of heterologous nucleic acid at such sites generally does not significantly affect viral infection or replication in the target tissue. Exemplary insertion sites are known in the art and include, but are not limited to, J2R (thymidine kinase (TK)), A56R (hemagglutinin (HA)), F14.5L, vaccinia growth factor (VGF), A35R, N1L, E2L/E3L, K1L/K2L, superoxide dismutase locus, 7.5K, C7-K1L (host range gene region), B13R+B14R (hemorrhagic region), A26L (A type inclusion body region (ATI)) or I4L (large subunit, ribonucleotide reductase) gene loci. Insertion sites for the viruses provided herein also include sites that correspond to intragenic regions described in other poxviruses such as Modified Vaccinia Ankara (MVA) virus (exemplary sites set forth in U.S. Pat. No. 7,550,147), NYVAC (exemplary sites set forth in U.S. Pat. No. 5,762,938).

[0284] Methods for the generation of recombinant viruses using recombinant DNA techniques are well known in the art (e.g., see U.S. Pat. Nos. 4,769,330; 4,603,112; 4,722,848; 4,215,051; 5,110,587; 5,174,993; 5,922,576; 6,319,703; 5,719,054; 6,429,001; 6,589,531; 6,573,090; 6,800,288; 7,045,313; He et al. (1998) PNAS 95(5): 2509-2514; Racaniello et al., (1981) Science 214: 916-919; and Hruby et al., (1990) Clin Micro Rev. 3:153-170). Methods for the generation of recombinant vaccinia viruses are well known in the art (e.g., see Hruby et al., (1990) Clin Micro Rev. 3:153-170, U.S. Pat. Pub. No. 2005-0031643, now U.S. Pat. Nos. 7,588,767, 7,588,771, 7,662,398 and U.S. Pat. No. 7,045,313).

[0285] For example, generating a recombinant vaccinia virus that expresses a heterologous gene product typically includes the use of a recombination plasmid which contains the heterologous nucleic acid, optionally operably linked to a promoter, with vaccinia virus DNA sequences flanking the heterologous nucleic acid to facilitate homologous recombination and insertion of the gene into the viral genome. Generally, the viral DNA flanking the heterologous gene is complementary to a non-essential segment of vaccinia virus DNA, such that the gene is inserted into a nonessential location. The recombination plasmid can be grown in and purified from Escherichia coli and introduced into suitable host cells, such as, for example, but not limited to, CV-1, BSC-40, BSC-1 and TK-143 cells. The transfected cells are then superinfected with vaccinia virus which initiates a replication cycle. The heterologous DNA can be incorporated into the vaccinia viral genome through homologous recombination, and packaged into infection progeny. The recombinant viruses can be identified by methods known in the art, such as by detection of the expression of the heterologous gene product, or by using positive or negative selection methods (U.S. Pat. No. 7,045,313).

[0286] In another example, the recombinant vaccinia virus that expresses a heterologous gene product can be generated by direct cloning (see, e.g. U.S. Pat. No. 6,265,183 and Scheiflinger et al. (1992) Proc. Natl. Acad. Sci. USA 89: 9977-9981). In such methods, the heterologous nucleic acid, optionally operably linked to a promoter, is flanked by restriction endonuclease cleavage sites for insertion into a unique restriction endonuclease site in the target virus. The virus DNA is purified using standard techniques and is cleaved with the sequence-specific restriction endonuclease, where the sequence is a unique site in the virus genome. Any unique site in the virus genome can be employed provided that modification at the site does not interfere with viral replication. For example, in vaccinia virus strain LIVP, the NotI restriction site is located in the ORF encoding the F14.5L gene with unknown function (Mikryukov et al., Biotekhnologiya 4: 442-449 (1988)). Table 5 provides a summary of unique restriction sites contained in exemplary LIVP strains and designates the nucleotide position of each. Such LIVP strains can be modified herein by direct cloning and insertion of heterologous DNA into the site or sites. Generally, insertion is in a site that is located in a non-essential region of the virus genome. For example, exemplary modifications herein include insertion of a foreign DNA sequence into the NotI digested virus DNA.

TABLE 5
Unique restriction endonuclease cleavage sites in LIVP clonal isolates

| Restriction Enzyme/ | | | | | | | | | LIVP |
|---|---|---|---|---|---|---|---|---|---|
| Site | | 1.1.1 | 2.1.1 | 4.1.1 | 5.1.1 | 6.1.1 | 7.1.1 | 8.1.1 | Parental |
| Name/ | SEQ | (SEQ ID | (SEQ ID | (SEQ ID | (SEQ ID | (SEQ ID | (SEQ ID | (SEQ ID | (SEQ ID |
| sequence | ID NO | NO: 2) | NO: 3) | NO: 4) | NO: 5) | NO: 6) | NO: 7) | NO: 8) | NO: 1) |
| SbfI | 64 | 40033/ | 40756/ | 39977/ | 40576/ | 40177/ | 40213/ | 40493/ | 38630/ |
| CCTGCAGG | | 40029 | 40752 | 39973 | 40572 | 40173 | 40209 | 40489 | 38626 |
| NotI | 65 | 42989/ | 43712/ | 42933/ | 43532/ | 43133/ | 43169/ | 43449/ | 41586/ |
| GCGGCCGC | | 42998 | 43716 | 42937 | 43536 | 43137 | 43173 | 43453 | 41590 |
| SgrAI | 66 | 114365/ | 115107/ | 114308/ | 114924/ | 114489/ | 114548/ | 114845/ | 112975/ |
| CRCCGGYG | | 114369 | 115111 | 114312 | 114928 | 114493 | 114552 | 114849 | 112979 |
| SmaI | 67 | 159260 | NA | NA | NA | NA | NA | NA | NA |
| CCCGGG | | | | | | | | | |
| TspMI | 68 | 159258/ | NA | NA | NA | NA | NA | NA | NA |
| CCCGGG | | 159262 | | | | | | | |
| XmaI | 69 | 159258/ | NA | NA | NA | NA | NA | NA | NA |
| CCCGGG | | 159262 | | | | | | | |
| ApaI | 70 | 180516/ | NA | 180377/ | 181027/ | 180638/ | 180596/ | 180972/ | NA |
| CCCGGG | | 180512 | | 180373 | 181023 | 180634 | 180592 | 180968 | |
| PspOMI | 71 | 180512/ | NA | 180373/ | 181023/ | 180634/ | 180592/ | 180968/ | NA |
| CCCGGG | | 180516 | | 180377 | 181027 | 180638 | 180596 | 180972 | |

[0287] In some examples, the virus genomic DNA is first modified by homologous recombination to introduce one or more unique restriction sites in the virus (see, e.g. Mackett et al. (1984) J. Virol. 857-864). Following cleavage with the restriction endonuclease, the cleaved DNA is optionally treated with a phosphatase to remove a phosphate moiety from an end of the DNA segment that is produced by cleavage with the endonuclease. Typically, a plasmid vector is generated that contains the heterologous DNA for insertion flanked by the restriction sites. Prior to insertion into the virus, the heterologous DNA is excised from the plasmid by cleavage with the sequence specific restriction endonuclease. The heterologous DNA is then ligated to the cleaved viral DNA and is packaged in a permissive cell line by infection of the cells with a helper virus, such as, but not limited to a fowpox virus or a puv-inactivated helper vaccinia virus, and transfection of the ligated DNA into the infected cells.

[0288] In some examples, the methods involve homologous recombination and/or use of unique restriction sites in the virus. For example, a recombinant LIVP vaccinia virus with an insertion, for example, in the F14.5L gene (e.g., in the Not I restriction site of an LIVP isolate) can be prepared by the following steps: (a) generating (i) a vaccinia shuttle/transfer plasmid containing the modification (e.g. a gene expression cassette or a modified F14.5L gene) inserted at a restriction site, X (e.g. Not I), where the restriction site in the vector is flanked by parental virus sequences of the target insertion site and (ii) an LIVP virus DNA digested at restriction site X (e.g. Not I) and optionally dephosphorylated; (b) infecting cells with PUV-inactivated helper vaccinia virus and transfecting the infected host cells with a mixture of the constructs of (i) and (ii) of step a; and (c) isolating the recombinant vaccinia viruses from the transfectants. One skilled in the art knows how to perform such methods (see, e.g., Timiryasova et al. (Biotechniques 31: 534-540 (2001)). Typically, the restriction site X is a unique restriction site in the virus as described above.

[0289] In one example, the methods include introducing into the viruses one or more genetic modifications, followed by screening the viruses for properties reflective of the modification or for other desired properties. In some examples, the modification can be fully or partially random, whereupon selection of any particular modified virus can be determined according to the desired properties of the modified the virus.

[0290] 3. Methods of Producing Viruses

[0291] Viruses in the compositions provided herein can be produced by methods known to one of skill in the art. Typically, the virus is propagated in host cells, quantified and prepared for storage before finally being prepared in the compositions described herein. The virus can be propagated in suitable host cells to enlarge the stock, the concentration of which is then determined. In some examples, the infectious titer is determined, such as by plaque assay. The total number of viral particles also can be determined. The viruses are stored in conditions that promote stability and integrity of the virus, such that loss of infectivity over time is minimized. In some examples, a large amount of virus is produced and stored in small aliquots of known concentration that can be used for multiple procedures over an extended period of time. Conditions that are most suitable for various viruses will differ, and are known in the art, but typically include freezing or drying, such as by lyophilization. The viruses can be stored at a concentration of 10⁵-10¹⁰ pfu/mL, for example, 10⁷-10⁹ pfu/mL, such as at least or about or 10⁶ pfu/mL, 10⁷ pfu/mL, 10⁸ pfu/mL or 10⁹ pfu/mL. Immediately prior to preparing compositions provided herein, the stored viruses can be reconstituted (if dried for storage) and diluted in an appropriate medium or solution.

[0292] The following sections provide exemplary methods that can be used for the production and preparation of viruses for use in preparing viruses in the compositions provided herein.

[0293] a. Host Cells for Propagation

[0294] Virus strains can be propagated in an appropriate host cell. Such cells can be a group of a single type of cells or a mixture of different types of cells. Host cells can include cultured cell lines, primary cells, and proliferative cells. These host cells can include any of a variety of animal cells, such as mammalian, avian and insect cells and tissues that are susceptible to the virus, such as vaccinia virus, infection, including chicken embryo, rabbit, hamster, and monkey kidney cells. Suitable host cells include, but are not limited to, hematopoietic cells (totipotent, stem cells, leukocytes, lymphocytes, monocytes, macrophages, APC, dendritic cells, non-human cells and the like), pulmonary cells, tracheal cells, hepatic cells, epithelial cells, endothelial cells, muscle cells (e.g., skeletal muscle, cardiac muscle or smooth muscle), fibroblasts, and cell lines including, for example, CV-1, BSC40, Vero, and BSC-1, and human HeLa cells. Typically, viruses are propagated in cell lines that that can be grown at monolayers or in suspension. For example, exemplary cell lines for the propagation of vaccinia viruses include, but are not limited to, CV-1, BSC40, Vero, BGM, BSC-1 and RK-13 cells. Purification of the cultured strain from the system can be effected using standard methods.

[0295] b. Concentration Determination

[0296] The concentration of virus in a solution, or virus titer, can be determined by a variety of methods known in the art. In some methods, a determination of the number of infectious virus particles is made (typically termed plaque forming units (PFU)), while in other methods, a determination of the total number of viral particles, either infectious or not, is made. Methods that calculate the number of infectious virions include, but are not limited to, the plaque assay, in which titrations of the virus are grown on cell monolayers and the number of plaques is counted after several days to several weeks, and the endpoint dilution method, which determines the titer within a certain range, such as one log. Methods that determine the total number of viral particles, including infectious and non-infectious, include, but are not limited to, immunohistochemical staining methods that utilize antibodies that recognize a viral antigen and which can be visualized by microscopy or FACS analysis; optical absorbance, such as at 260 nm; and measurement of viral nucleic acid, such as by PCR, RT-PCR, or quantitation by labeling with a fluorescent dye.

[0297] c. Storage Methods

[0298] Once the virus has been purified (or to a desired purity) and the titer has been determined, the virus can be stored in conditions which optimally maintain its infectious integrity. Typically, viruses are stored in the dark, because light serves to inactivate the viruses over time. Viral stability in storage is usually dependent upon temperatures. Although some viruses are thermostable, most viruses are not stable for more than a day at room temperature, exhibiting reduced viability (Newman et al., (2003) J. Inf. Dis. 187:1319-1322). Vaccinia virus is generally stable at refrigerated temperatures, and can be stored in solution at 4° C., frozen at, for example −20° C., −70° C. or −80° C., or lyophilized with little loss of viability (Newman et al., (2003) J. Inf. Dis. 187:1319-1322, Hruby et al., (1990) Clin. Microb. Rev. 3:153-170). Methods and conditions suitable for the storage of particular viruses are known in the art, and can be used to store the viruses used in the methods presented herein. It is understood that stability of the virus can be increased by providing the viruses in protein polymer (e.g. SELP) compositions as provided herein. This section describes parameters for storage of viruses that are not contained in a protein polymer.

[0299] For short-term storage of viruses, for example, 1 day, 2 days, 4 days or 7 days, temperatures of approximately 4° C. are generally recommended. For long-term storage, most viruses can be kept at −20° C., −70° C. or −80° C. When frozen in a simple solution such as PBS or Tris solution (20 mM Tris pH 8.0, 200 NaCl, 2-3% glycerol or sucrose) at these temperatures, the virus can be stable for 6 months to a year, or even longer. Repeated freeze-thaw cycles are generally avoided, however, since it can cause a decrease in viral titer. The virus also can be frozen in media containing other supplements in the storage solution which can further preserve the integrity of the virus. For example, the addition of serum or bovine serum albumin (BSA) to a viral solution stored at −80° C. can help retain virus viability for longer periods of time and through several freeze-thaw cycles.

[0300] In other examples, the virus sample is dried for long-term storage at ambient temperatures. Viruses can be dried using various techniques including, but not limited to, freeze-drying, foam-drying, spray-drying and desiccation. Water is a reactant in nearly all of the destructive pathways that degrade viruses in storage. Further, water acts as a plasticizer, which allows unfolding and aggregation of proteins. Since water is a participant in almost all degradation pathways, reduction of the aqueous solution of viruses to a dry powder provides an alternative composition methodology to enhance the stability of such samples. Lyophilization, or freeze-drying, is a drying technique used for storing viruses (see, e.g., Cryole et al., (1998) Pharm. Dev. Technol., 3(3), 973-383). There are three stages to freeze-drying; freezing, primary drying and secondary drying. During these stages, the material is rapidly frozen and dehydrated under high vacuum. Once lyophilized, the dried virus can be stored for long periods of time at ambient temperatures, and reconstituted with an aqueous solution when needed. Various stabilizers can be included in the solution prior to freeze-drying to enhance the preservation of the virus. For example, it is known that high molecular weight structural additives, such as serum, serum albumin or gelatin, aid in preventing viral aggregation during freezing, and provide structural and nutritional support in the lyophilized or dried state. Amino acids such as arginine and glutamate, sugars, such as trehalose, and alcohols such as mannitol, sorbitol and inositol, can enhance the preservation of viral infectivity during lyophilization and in the lyophilized state. When added to the viral solution prior to lyophilization, urea and ascorbic acid can stabilize the hydration state and maintain osmotic balance during the dehydration period. Typically, a relatively constant pH of about 7.0 is maintained throughout lyophilization.

[0301] Other methods for the storage of viruses at ambient, refrigerated or freezing temperatures are known in the art, and include, but are not limited to, those described in U.S. Pat. Nos. 5,149,653; 6,165,779; 6,255,289; 6,664,099; 6,872,357; and 7,091,030; and in U.S. Pat. Pub. Nos. 2003-0153065, 2004-003841 and 2005-0032044.

[0302] d. Preparation of Virus

[0303] Immediately prior to use, the virus can be prepared at an appropriate concentration in suitable media, and can be maintained at a cool temperature, such as on ice, until use. If the virus was lyophilized or otherwise dried for storage, then it can be reconstituted in an appropriate aqueous solution. The aqueous solution in which the virus is prepared is typically the medium used in the assay (e.g., DMEM or RPMI) or one that is compatible, such as a buffered saline solution (e.g., PBS, TBS, Hepes solution). For pharmaceutical applications, the virus can be immediately prepared or reconstituted in a pharmaceutical solution. Numerous pharmaceutically acceptable solutions for use are well known in the art (see e.g. Remington's Pharmaceutical Sciences (18^{th} edition) ed. A. Gennaro, 1990, Mack Publishing Co., Easton, Pa.). In one example, the viruses can be diluted in a physiologically acceptable solution, such as sterile saline or sterile buffered saline, with or without an adjuvant or carrier. In other examples, the pharmaceutical solution can contain a component that provides viscosity (e.g. glycerol) and/or component that has bactericidal properties (e.g. phenol). The virus can be reconstituted or diluted to provide the desired concentration or amount. The particular concentration can be empirically determined by one of skill in the art depending on the particular application.

### D. PROTEIN POLYMERS

[0304] The compositions provided herein contain a vaccinia virus in a protein polymer matrix or hydrogel. Hydrogel-forming polymers are polymers that are capable of absorbing a substantial amount of water to form elastic or inelastic gels. Hydrogel-forming polymers offer the flexibility of being maintained or delivered in liquid or gelled form. For example, the vaccinia virus in protein polymer compositions provided herein can be liquid at room temperature and form hydrogels at body temperature. The release of vaccinia virus incorporated into the hydrogel takes place through the gelled matrix via a diffusion mechanism.

[0305] Exemplary protein polymers include, but are not limited to, any described in U.S. Pat. Nos. 5,243,038, 5,641,648, 5,760,004, 5,770,697, 5,773,249, 5,830,713, 6,148,348, 6,140,072, 6,034,220, 6,018,030, 6,355,766, 7,546,147,7,662.409 or 6,380,154; U.S. Published Patent Application Nos. US2007/0098702, US2010/0022455, US2009/0093621, US2010/143487 or US2010/0261652; International Published PCT Application No. WO2004/104020; or Capello et al. (1998) J. Controlled Release, 53:105-117, Ghandehari et al. (2009) Polymer, 50:366-374; Haider et al. (2005) Molecular Phamaceutics, 2:139-150; Price et al. (2012) International Journal of Pharmaceutics, 427:97-104; and Megeed et al. (2002) Advanced Drug Delivery Reviews, 54:1075-1091).

[0306] A protein polymer for use in preparing the hydrogels compositions herein can be composed of a protein or proteins having multiple repeating amino acid residues.

[0307] The protein generally contains repetitive amino acid units of from or about between 3 to 20 amino acids. The protein typically is a natural protein or is derivative, artificial and/or synthetic sequence thereof. In particular, the protein is one that is capable of being degraded and/or safely resorbed upon administration to a subject in vivo.

[0308] Exemplary protein polymers are composed of silk-like units, elastin-like units, collagen-like units, keratin-like units, or any combination thereof. For example, silk-like proteins have a repeating unit of GAGAGS (SEQ ID NO:26) or SGAGAG (SEQ ID NO:27), which is a repeating unit that is found naturally in silk fibroin protein represented as GAGAG(SGAGAG)₈SGAAGY (SEQ ID NO:28). Elastin-like proteins have a base repeating unit of GVGVP (SEQ ID NO.29), VPGG (SEQ ID NO:30), APGVGV (SEQ ID NO:31), or VPGVG (SEQ ID NO:32), which are repeating units found in naturally occurring elastin. Collagen-like proteins have repeating triad units of G-x-y (x=any amino acid, often alanine or proline; y=any amino acid, often proline or hydroxy-proline). Typically, x and y are selected such that the proline content in the triads of the polymer is less than about 45% (see e.g. U.S. Pat. No. 5,773,249). A single collagen-like unit can contain at least about 2 and not more than about 100 tandemly repeated triads, more usually not more than about 75, frequently not more than about 50, more frequently not more than about 25. Keratin-like units contain a “heptad” repeat unit made up of a seven amino acid long stretch with two positions separated by two amino acids, usually positions three and six, occupied consistently with hydrophobic, aliphatic or aromatic residues (see e.g., U.S. Pat. No. 5,514,581). Exemplary of such repeating units are AKLKLAE (SEQ ID NO:33) or AKLELAE (SEQ ID NO:34). Other natural proteins containing repetitive amino acids units are known (see e.g. U.S. Pat. No. 6,355,776).

[0309] It is understood that variations in amino acids in the repeating unit are permitted, such as the particular order of the amino acids in the sequence and conservative substitutions, such as, but not limited to, replacing serine with threonine and glycine with alanine. For example, amino acid sequence units and elements of the polymers can be modified by amino acid replacement, e.g. conservative substitution, of amino acids at various positions in their sequences. For example, examples of modified elastin-like blocks have been reported (see e.g., Urry et al. (1992) Biopolymers 32:1243-1250). Substitutions of amino acids can impart changes in the chemical nature of the protein within which these blocks reside. For example, the replacement of the first valine in GVGVP (SEQ ID NO:29) with a more hydrophobic amino acid such as phenylalanine will decrease the lower critical solution temperature at which the elastin-like protein polymer is soluble. Replacing this valine with a more hydrophilic amino acid such as lysine will increase the lower critical solution temperature of the polymer solution. While these modified elastin-like blocks can affect certain chemical or physical properties, they can be readily chosen so as not to destroy the ability of protein polymers containing crystallizable silk-like blocks to acquire a non-liquid form, i.e., by gelation or solidification. Exemplary modified elastin-like units also include those depicted by a base repeating unit of GXGVP (SEQ ID NO:35) or VPGXG (SEQ ID NO:36), where X is valine, lysine, histidine, glutamic acid, arginine, aspartic acid, serine, tryptophan, tyrosine, phenylalanine, leucine, glutamine, asparagine, cysteine or methionine, and typically valine or lysine.

[0310] Exemplary of alternating units in the polymers herein are amino acid sequences that 1) promote protein crystallization (e.g. silk-like amino acid sequence unit) and 2) influence water solubility (e.g. keratin-like, collagen-like or elastin-like amino acid sequence unit). A protein polymer can have the following formulas: [(C)a(X)b]c or [(X)_{b}(C)a]c, where “X” represents an amino acid sequence element that is an elastin-like, collagen-like or keratin-like unit and “b” represents the number of such units present in the monomer segment, “C” represents an amino acid sequence unit of from about 3 to 30 amino acid which promotes protein crystallization and “a” represents the number of such units present in the monomer segment and “c” represents the number of monomer units which are repeated in the protein polymer. Monomer segments are generally composed of multiple protein crystallization units (e.g. silk-like elastin) followed by multiple elastin-like, collagen-like or keratin-like units or vice versa (as shown in the above formulas), however, insertion of one or more of one unit type within a run of multiple units of the other unit type can also be employed. By selecting the number and order of amino acid motifs or repeats in the monomeric units of each polymer, the hydrophilic properties of the polymer can be modified.

[0311] Amino acid sequence units that promote protein crystallization are sequences from about 3 to 30 amino acids in length which, for the most part, possess relatively simple amino acids with relatively low molecular weight side chains including, for example, glycine, alanine, serine, threonine, cysteine and valine. Because these “protein crystallization units” possess, for the most part, relatively small molecular weight amino acids, they are capable of forming extended chain conformations such as β-sheets or β-strands that allow chains of the polypeptide to come into close proximity where hydrogen bonding may occur. These units allow the formation of ordered structures. Different protein crystallization units are known in the art (e.g., Fossey et al., Biopolymers 31(13):1529-1542 (1991)). Exemplary of protein crystallization units for use in protein polymers are “silk-like” units that generally possess the amino acid sequence GAGAGS (SEQ ID NO:26) or SGAGAG (SEQ ID NO:27). The silk-like units can be combined with an elastin-like unit to generate silk-elastin protein polymers (SELPs).

[0312] The ratio of the alternating units can be adjusted depending on the desired hydrophilic or other properties of the polymer. For example, in the case of SELPs, the nature of the elastinlike blocks, and their length and position within the monomers influences the water solubility of the SELP. For example, decreasing the length and/or content of the silk-like block domains, while maintaining the length of the elastin-like block domains, increases the water solubility of the polymers. Generally, the ratio of amino acid sequence units that promote protein crystallization (e.g. silk-like amino acid sequence unit) versus that amino acid sequence unit that influence water solubility (e.g. keratin-like, collagen-like or elastin-like amino acid sequence unit) per monomer segment is in the range of about 0.5, usually about 1 to 5. For the most part, there will be at least two protein crystallization units (e.g. silk-like amino acid sequence unit) per monomer segment and not more than about 16, usually not more than about 12, and generally ranging from about 2 to 8 or from about 4 to 8. For the elastin-like, collagen-like or keratin-like amino acid sequence elements, there will usually be at least two per monomer segment, typically at least about four, generally ranging from about 6 to 32, 6 to 18 or 6 to 16.

[0313] Typically, the polymers provided herein contain a plurality of monomer segments in order to generate higher molecule weight protein polymers. The polymers in the compositions provided herein contain multiple repeats of monomer units. The protein polymers are at least about 15 kDa and generally not more than about 250 kDa, usually not more than about 175 kDa, more usually not more than 125 kDa, typically ranging from about 15 to 100 kDa and more generally from about 50 to 90 kDa in size. In order to achieve repetitive protein polymers within these molecular weight ranges, the number of repetitive monomer segments incorporated into the polymer will provide for the desired molecular weight. In this regard, the number of monomer segments in the polymer can vary widely, depending upon the size of each individual monomer. Thus, the number of monomers can vary generally from about 2 to 100, usually from about 2 to 40, more usually ranging from about 6 to 20 and generally from about 8 to 13.

[0314] The amino acid sequence of protein polymers in the compositions herein also can contain non-repetitive amino acid units at the N- and C-termini of the protein polymer. Such sequences are referred to as the head and tail portions of the amino acid sequence of the polymer. Usually, the terminal sequences will contribute fewer than ten number percent of the total amino acids, more usually fewer than five number percent of the total amino acids present in the polymer. Generally, the terminal amino acid sequences will range from about 0-125 amino acids, more usually from about 0-60 amino acids, where the total number of amino acids will generally not exceed about 100 amino acids, more usually not exceed about 50 amino acids. For example, based upon the method of preparation of the polymer, the N- and/or C-termini can contain additional non-repetitive amino acid sequences. For example, generally, the presence of a non-repetitive N-terminus will be the result of insertion of the gene into a vector in a manner that results in expression of a fusion protein. Any protein which does not interfere with the desired properties of the product can provide the N-terminus. Particularly, endogenous host proteins, e.g. bacterial proteins, can be employed. The choice of protein can depend on the nature of the transcriptional initiation region. The N- and C-terminal sequence can be one that can be, if desired, removed in whole or in part by a protease.

[0315] The protein polymers also can be modified to contain intervening amino acid sequences between one or more monomer segments or the alternating block units which make up the monomer segment or by otherwise modifying one or more amino acid residues present in the polymer. Intervening sequences can include from about 1 to 60, usually about 3 to 40 amino acids, and may provide for a wide variety of properties including promotion of polymer chain interactions mediated by hydrogen bonding, salt bridges and/or hydrophobic interactions. For example, by including amino acids that have chemically reactive sidechains, sites can be provided for linking a variety of chemically or physiologically active compounds, for cross-linking, for covalently bonding compounds that can change the rate of resorption, tensile properties, or for altering the rate of release of an incorporated biologically active compound. Thus, amino acids such as cysteine, aspartic acid, glutamic acid, lysine and arginine can be incorporated in these intervening sequences. Alternatively, intervening sequences can provide for sequences that exhibit a physiological property or activity, such as cell binding, specific protein binding, enzyme substrates, or specific receptor binding. In addition, one or more amino acid residues in the polymer can be modified, either chemically or otherwise, to provide for or influence a particular property, such as polymerization rates, tensile strengths, or rates of resorption in vivo. For example, hydroxyalkylation at various amino acid sites can be made.

[0316] 1. Silk-Elastin Like Polymers (SELP)

[0317] Exemplary protein polymers for use in the compositions herein is a silk-elastinlike protein polymer (SELP). SELPs are exemplary polymers that are initially water soluble, but can spontaneously convert to gels. SELPs contain monomer units composed of alternating amino acid sequence units that are identical or similar to those found in natural silks and elastins. The silk units permit formation of hydrogen bonds for the formation of hydrogels, while the elastin units confer aqueous solubility.

[0318] For example, the units employed in SELP protein polymers generally have the “silk-like” amino acid sequences GAGAGS (SEQ ID NO:26) or SGAGAG (SEQ ID NO:27) and the “elastin-like” amino acid sequences VPGG (SEQ ID NO:30), APGVGV (SEQ ID NO:31), VPGVG (SEQ ID NO:32), VPGKG (SEQ ID NO:37), GKGVP (SEQ ID NO:38) or GVGVP (SEQ ID NO:29). It is understood that the particular sequence can be varied to alter a property of the polymer, such as is described below, by inclusion of conservative substitutions, such as, but not limited to, replacing serine with threonine and glycine with alanine, or by the particular order of the amino acids in the sequence. Also, in some examples, the particular sequence can be varied by having alternate multimers with the same or different handedness.

[0319] At body temperature, SELPS undergo a nonreversible crystallization event resulting in gelation, which can be controlled by adjusting the copolymer structure. For example, the silk and elastin units can be combined in various ratios and sequences to produce polymers with various properties. For example, the addition of elastin units disrupts the crystalline structure in silks and makes the silk-elastin copolymers more water soluble. In contrast, increasing the number of silk units increases the rate of gelation. In addition, the length of the polymer and its molecular weight also influence the degree of cross-linking of formation of hydrogels. Thus, varying the number of monomer repeats in the polymer also can influence the properties of gelation, release and biodegradation of the SELPs. In the compositions herein, the choice of polymer is such that the compositions are liquid at room temperature, and form a hydrogel within minutes upon exposure to body temperature, for example, after injection. For example, the exemplary SELP, SELP-47K undergoes a soluble in aqueous medium to gel transition to form hydrogels (sol-to-gel) that is slow at room temperature (several occurs), but that occurs within minutes at 37° C. It is within the level of one of skill in the art to empirically choose a SELP for use in the composition herein depending on the particular virus, the particular application or treatment, including the particular tumor or the particular route of administration (e.g. topical or intravenous).

[0320] Generally, silk-elastinlike polymers (also called ProLastins) can be defined using the general formula {[S]ₘ[E]ₙ}_{O}, where “S” is the silklike block or other similar sequence and “E” is an elastic-like block or other similar sequence (see e.g. Cappello et al. (1998) Journal of Controlled. Release, 53:105-117). Generally, m is from 2 to 16, such as 2 to 8 and n can be any number, but generally is from 1 to 16. In particular, the ratio of silk-like units (m) to elastin-like units (n) can be from 1:20 to 20:1. In other aspects, the ratio is 1:1 to 1:16, such as 1:2 to 1:10, 1:2 to 1:8, 1:2 to 1:6, or 1:2 to 1:4. With respect to length and size of the polymer, o is the number of monomer repeats and generally is from 2 to 100. The protein polymers generally have a molecular weight from 15,000 to 100,000 daltons (Da), for example, 60,000 to 85,000 Da. The number of monomer repeats o can be chosen to yield this molecular weight depending on the chosen units m and n.

[0321] Exemplary SELPs are set forth in Table 6. In addition to the repeating units or blocks, all polymers also can contain additional N- and C-terminal sequences (heads and tail sequences). Exemplary of a head sequence is MDPVVLQRRDWENPGVTQLNRLAAHPPFASDPM (set forth in SEQ ID NO:58). Exemplary of a tail sequence is GAGAMDPGRYQDLRSHHHHHH (set forth in SEQ ID NO:59) or GAMDPGRYQDLRSHHHHHH (set forth in SEQ ID NO:60). The head and tail portions are derived from the genetic expression system employed and can be removed by specific chemical cleavage if desired.

TABLE 6
Exemplary SELPs

| | | Repeated Sequence^{a} | |
|---|---|---|---|
| NAME | MW | (Seq ID) | Reference |
| SELP 0 | 80,502 | [(VPGVG)₈(GAGAGS)₂]₁₈ | U.S. Pat. No. 6,380,154; Megeed et al. |
| | | (SEQ ID NO: 39) | (2002) Advanced Drug Delivery |
| | | | Reviews, 54: 1075-1091 |
| SELP1 | 89000 | [(GVGVP)₄(GAGAGS)₉]₁₃ | Megeed et al. (2002) Advanced |
| | | (SEQ ID NO: 40) | Drug Delivery Reviews, 54: 1075- |
| | | | 1091 |
| SELP 8 | 69,934 | [(VPGVG)₈(GAGAGS)₄]₁₂^{b} | U.S. Pat. No. 6,380,154; Megeed et al. |
| | | (SEQ ID NO: 41) | (2002) Advanced Drug Delivery |
| | | | Reviews, 54: 1075-1091 |
| SELP 7 | 80,338 | [(VPGVG)₈(GAGAGS)₆]₁₂^{b} | U.S. Pat. No. 6,380,154; Megeed et al. |
| | | (SEQ ID NO: 42) | (2002) Advanced Drug Delivery |
| | | | Reviews, 54: 1075-1091 |
| SELP3 | 84,267 | [(VPGVG)₈(GAGAGS)₈]₁₁^{b} | U.S. Pat. No. 6,380,154; Megeed et al. |
| | | (SEQ ID NO: 43) | (2002) Advanced Drug Delivery |
| | | | Reviews, 54: 1075-1091 |
| SELP 4 | 79,574 | [(VPGVG)₁₂(GAGAGS)₈]₈^{b} | U.S. Pat. No. 6,380,154; Megeed et al. |
| | | (SEQ ID NO: 44) | (2002) Advanced Drug Delivery |
| | | | Reviews, 54: 1075-1091 |
| SELP 5 | 84,557 | [(VPGVG)₁₆(GAGAGS)₈]₇^{b} | U.S. Pat. No. 6,380,154; Megeed et al. |
| | | (SEQ ID NO: 45) | (2002) Advanced Drug Delivery |
| | | | Reviews, 54: 1075-1091 |
| SELP 6 | | [(VPGVG)₃₂(GAGAGS)₈]₅ | U.S. Pat. No. 6,380,154 |
| | | (SEQ ID NO: 46) | |
| SELP F | 75,957 | (GAGAGS)₁₂GAAVTGRGDSPASA | U.S. Pat. No. 6,380,154; Megeed et al. |
| | | AGY (GAGAGS)₅(GVGVGP)₈]₆^{b} | (2002) Advanced Drug Delivery |
| | | (SEQ ID NO: 47) | Reviews, 54: 1075-1091 |
| SELP 0K | | [(GAGAGS)₂(GVGVP)₄GKGVP | U.S. Pat. No. 6,380,154; Megeed et al. |
| (SELP | | (GVGVP)₃]₆ | (2002) Advanced Drug Delivery |
| 27K, 6- | | (SEQ ID NO: 48) | Reviews, 54: 1075-1091; Cappello |
| mer) | | | et al. (1998) Journal of |
| | | | Controlled Release, 53: 105-117 |
| SELP 0K | | [(GAGAGS)₂(GVGVP)₄GKGVP | U.S. Pat. No. 6,380,154; Megeed et al. |
| (SELP | | (GVGVP)₃]₁₂ | (2002) Advanced Drug Delivery |
| 27K, 12- | | (SEQ ID NO: 49) | Reviews, 54: 1075-1091; Cappello |
| mer) | | | et al. (1998) Journal of |
| | | | Controlled Release, 53: 105-117 |
| SELP 0K | | [(GAGAGS)₂(GVGVP)₄GKGVP | U.S. Pat. No. 6,380,154; Megeed et al. |
| (SELP | | (GVGVP)₃]₁₈ | (2002) Advanced Drug Delivery |
| 27K, 18- | | (SEQ ID NO: 50) | Reviews, 54: 1075-1091; Cappello |
| mer) | | | et al. (1998) Journal of |
| | | | Controlled Release, 53: 105-117 |
| SELP 0K | 76,639 | [(GAGAGS)₂(GVGVP)₄GKGVP | U.S. Pat. No. 6,380,154; |
| (SELP | | (GVGVP)₃]₁₇GAGAGS)₂ | U.S. Pat. No. 6,423,333; |
| 27K, 17- | | (SEQ ID NO: 51) | Megeed et al. (2002) Advanced |
| mer) | | | Drug Delivery Reviews, 54: 1075- |
| (hereinafter | | | 1091; Cappello et al. (1998) |
| SELP27K) | | | Journal of Controlled Release, |
| | | | 53: 105-117; |
| SELP0K- | 76,389 | [(GAGAGS)₂(GVGVP)₁LGPLGP | U.S. Pat. No. 6,423,333 |
| CS1 | | (GVGVP)₃GKGVP(GVGVP)₃]₁₅ | |
| (SELP27K, | | (GAGAGS)₂ | |
| 15-mer) | | (SEQ ID NO: 73) | |
| SELP0K- | 83,218 | [(GAGAGS)₂(GVGVP)₁GFFVRARR | U.S. Pat. No. 6,423,333 |
| CS2 | | (GVGVP)₃GKGVP | |
| | | (GVGVP)₃)₁₅(GAGAGS)₂ | |
| | | (SEQ ID NO: 74) | |
| SELP 8K | 69,814 | [(GAGAGS)₂-(GVGVP)₄-(GKGVP) | U.S. Pat. No. 6,380,154; Megeed et al. |
| (SELP47K) | | (GVGVP)₃-(GAGAGS)₂]₁₃ | (2002) Advanced Drug Delivery |
| | | (SEQ ID NO: 52) | Reviews, 54: 1075-1091; Cappello |
| | | | et al. (1998) Journal of |
| | | | Controlled Release, 53: 105-117; |
| | | | Gustafson et al. (2010) Advanced |
| | | | Drug Delivery Reviews, 62: 1509- |
| | | | 1523; Haider et al. (2004) |
| | | | Molecular Pharmaceutics, 2: 139- |
| | | | 150 |
| SELP 9K | 60,103 | [GAGAGS(GVGVP)₄GKGVP | U.S. Pat. No. 6,380,154; Megeed et al. |
| | | (GVGVP)₃(GAGAGS)₂]₁₂ | (2002) Advanced Drug Delivery |
| | | (SEQ ID NO: 53) | Reviews, 54: 1075-1091 |
| SELP 415K | 65,374 | [GVGVP)₄GKGVP(GVGVP)₁₁ | Haider et al. (2004) Molecular |
| timer | Da | (GAGAGS)₄]₅(GVGVP)₄GKGVP | Pharmaceutics, 2: 139-150; |
| | | (GVGVP)₁₁(GAGAGS)₂ | |
| | | (SEQ ID NO: 54) | |
| SELP 415K | 71,500 | [(GVGVP)₄(GKGVP)(GVGVP)₁₁ | Haider et al. (2004) Molecular |
| 8 mer | Da | (GAGAGS)₄]₇(GVGVP)₄GKGVP | Pharmaceutics, 2: 139-150; |
| | | (GVGVP)₁₁(GAGAGS)₂ | Gustafson et al. (2010) Advanced |
| | | (SEQ ID NO: 55) | Drug Delivery Reviews, 62: 1509- |
| | | | 1523 |
| SELP | 87860 | [GVGVP)₄GKGVP(GVGVP)₁₁ | Haider et al. (2004) Molecular |
| 415K- | | (GAGAGS)₄]₉(GVGVP)₄GKGVP | Pharmaceutics, 2: 139-150; |
| 10 mer | | (GVGVP)₁₁(GAGAGS)₂ | |
| | | (SEQ ID NO: 56) | |
| SELP 815K | 65374 | [GAGS(GAGAGS)₂(GVGVP)₄ | Gustafson et al. (2010) Advanced |
| 6-mer | | GKGVP(GVGVP)₁₁ | Drug Delivery Reviews, 62: 1509- |
| | | (GAGAGS)5GA]₆ | 1523; Gustafson et al. (2010) |
| | | (SEQ ID NO: 57) | Mol. Pharm., 7: 1050-1056 |

^{a}depicted without the head and tail sequences as set forth in SEQ ID NOS: 58 and 59 or 60
^{b}depicted without the split of the first and last block domain of the polymer. Thus, the SELP additionally includes a further repeat of the monomer, whereby a partial segment of monomer exists at the beginning and the remaining segment at the end. This is due to a split of the encoded amino acid sequence within the silk units, such that the first and last block domain of the polymer is split within the silk bocks whereby both parts sum to a whole domain

[0322] In one example, exemplary of a SELP in the VV-SELP compositions herein is SELP-27K. SELP-27K contains the repeating structure (S₂E₄E_{K}E₃)₁₇, where S is the silk-like sequence of amino acids GAGAGS (SEQ ID NO:26), E is the elastin-like sequence GVGVP (SEQ ID NO:29), and E_{K} is the elastin like sequence modified with a lysine residue GKGVP (SEQ ID NO:38). The repeating structure is depicted in SEQ ID NO: 51. The multimeric portion of SELP 27K is expressed as a fusion protein between amino-terminus “head” and carboxy-terminus “tail” sequences of 33 and 19 amino acids, respectively. Hence, the polymer further can contain a head and tail (N- and C-terminus) sequence. The head sequence of amino acids is MDPVVLQRRD WENPGVTQLN RLAAHPPFAS DPM (SEQ ID NO:58) and the tail sequence is GAM DPGRYQDLRSHHHHHH (SEQ ID NO:60). The SELP27K has a molecular weight of about 77,000 Daltons. For example, SELP27K is set forth as follows (SEQ ID NO:61):

[MDPVVLQRRDWENPGVTQLNRL AAHPPFASDPM]
[(GAGAGS)₂-(GVGVP)₄-(GKGVP)-(GVGVP)₃]₁₇-(GAGAGS)₂-
[GAMDPGRYQDLRSHHHHHH]

[0323] In another example, exemplary of a SELP in the VV-SELP compositions herein is SELP-47K. SELP-47K contains the repeating structure (S₂E₃E_{K}E₄S₂)₁₃, where S is the silk-like sequence of amino acids GAGAGS (SEQ ID NO:26), E is the elastin-like sequence GVGVP (SEQ ID NO:29), and E_{K} is the elastin like sequence modified with a lysine residue GKGVP (SEQ ID NO:38). This repeating structure is depicted in SEQ ID NO:52. The multimeric portion of SELP 47K is expressed as a fusion protein between amino-terminus “head” and carboxy-terminus “tail” sequences of 33 and 19 amino acids, respectively. Hence, the polymer further can contain a head and tail (N- and C-terminus) sequence. The head sequence of amino acids is MDPVVLQRRD WENPGVTQLN RLAAHPPFAS DPM (SEQ ID NO:58) and the tail sequence is GAM DPGRYQDLRSHHHHHH (SEQ ID NO:60). The SELP47K has a molecular weight of about 70,000 Daltons, and a pI of 10.5. For example, SELP47K is set forth as follows (SEQ ID NO:62):

[MDPVVLQRRDWENPGVTQLNRL AAHPPFASDPM]
[(GAGAGS)₂-(GVGVP)₄-(GKGVP)-(GVGVP)₃-(GAGAGS)₂]₁₃-
[GAMDPGRYQDLRSHHHHHH]

[0324] In a further example, exemplary of a SELP in the VV-SELP compositions herein is SELP-815K. SELP-815K contains the repeating structure (S₂E₄E_{K}E₁₁S₆)₆, where S is the silk-like sequence of amino acids GAGAGS (SEQ ID NO:26), E is the elastin-like sequence GVGVP (SEQ ID NO:29), and E_{K} is the elastin like sequence modified with a lysine residue GKGVP (SEQ ID NO:38). It is named because it contains a monomer repeat of eight silk units followed by 15 elastin units, with one elastin unit containing a lysine substitution. One of the silk units is split such that the first and last block domain of the polymer is split within the silk bocks whereby both parts sum to a whole domain. This repeating structure is set forth in SEQ ID NO:57. The multimeric portion of SELP 815K is expressed as a fusion protein between amino-terminus “head” and carboxy-terminus “tail” sequences of 33 and 19 amino acids, respectively. Hence, the polymer further can contain a head and tail (N- and C-terminus) sequence. The head sequence of amino acids is MDPVVLQRRD WENPGVTQLN RLAAHPPFAS DPM (SEQ ID NO:58) and the tail sequence is GAM DPGRYQDLRSHHHHHH (SEQ ID NO:60). The SELP815K has a molecular weight of about 65,000 Daltons. For example, SELP815K is set forth as follows (SEQ ID NO:63):

MDPVVLQRRDWENPGVTQLNRLAAHPPFASDPM
[GAGS(GAGAGS)₂(GVGVP)₄GKGVP(GVGVP)₁₁(GAGAGS)₅GA]₆
GASMDPGRYQDLRSHHHHHH

[0325] 2. Methods of Preparing and Generating Polymers

[0326] The oligomers or repeat polymers, including SELP polymers, can be prepared by various methods known to one of skill in the art (Megeed et al. (2002) Advanced Drug Delivery Reviews, 54:1075-1091). For example, the repeat polymers can be synthesized by generally recognized methods of chemical synthesis (for example, L. Andersson et al., Large-scale synthesis of peptides, Biopolymers 55(3), 227-50 (2000)), genetic manipulation (for example, J. Cappello, Genetically Engineered Protein Polymers, Handbook of Biodegradable Polymers, Domb, A. J.; Kost, J.; Wiseman, D. (Eds.), Harvard Academic Publishers, Amsterdam; pages 387-414), and enzymatic synthesis (for example, C H. Wong & K. T. Wang, New Developments in Enzymatic Peptide Synthesis, Experientia 47(11-12), 1123-9 (1991)). For example, the repeat sequence protein polymers can be synthesized using the methods described in U.S. Pat. Nos. 5,243,038 and 6,355,776. In another example, the repeat sequence protein polymers can by synthesized utilizing non-ribosomal peptide synthase (for example, H. V. Dohren, et al., Multifunctional Peptide Synthase, Chem. Rev 97, 2675-2705 (1997).

[0327] For example, the protein polymers, including SELP polymers, can be prepared in accordance with the manner described in U.S. Pat. No. 5,243,038. For example, one procedure involves synthesizing small segments of single stranded DNA of from about 15 to 150 nucleotides to provide a plurality of fragments which have cohesive ends, which can be ligated together to form a segment or a plurality of segments. The first dsDNA fragment is cloned to ensure the appropriate sequence, followed by the addition of successive fragments, which are in turn cloned and characterized, to ensure that the integrity of the sequence is retained. The fragments are joined together to form a monomer segment which, as described above, then becomes the major repeating building block of the polymer gene.

[0328] For example, two different oligomeric units can be prepared where the termini of the two units are complementary one with the other but the termini of the same unit are unable to bind together. In this way one can build individual oligomeric units and then join them together to form the concatemer, where the intervening linking sequences are defined at least in part by the termini. Alternatively, long single strands can be prepared, cloned and characterized, generally being of at least 100 nucleotides and up to about 300 nucleotides, where the two single strands are hybridized, cloned and characterized and can then serve as the monomer segment. The monomers can then be multimerized, having complementary termini, particularly cohesive ends, so that the polymer will have two or more monomers present. The multimers can then be cloned in an appropriate vector and characterized to determine the number of monomers and the desired size polymer selected.

[0329] Depending upon the construct, the 5′ terminus can provide for the initiation codon methionine, or the structural gene can be joined to an adapter that can provide for a unique sequence (optionally cleavable by a specific enzyme) at the 5′ terminus or can be inserted into a portion of gene, usually endogenous to the host, in proper reading frame so as to provide for a fusion product. By providing for appropriate complementary termini between the adapter or truncated gene and the 5′ end of the subject structural gene, the sequences can be joined in proper reading frame to provide for the desired protein. The inclusion of adapters or fusion proteins can provide specific sequences for purposes such as linking, secretion, complex formation with other proteins, or affinity purification.

[0330] Expression can be achieved in an expression host using transcriptional regulatory regions functional in the expression host. The expression host can be prokaryotic or eukaryotic, particularly bacterial (e.g. E. coli, B. subtilis); yeast (e.g. Saccharomyces, Neurospora); insect cells, plant cells, mammalian cells. If desired, a signal sequence can be provided for secretion of the polymer. A wide variety of signal sequences are known and have been used extensively for secreting proteins which are not normally secreted by the expression host.

[0331] After completion of expression, where the protein is retained in the host, the cells are disrupted and the product extracted from the lysate. Where the product is secreted, the product can be isolated from the supernatant. In either case, various techniques for purifying the products can be employed, depending upon whether the products are soluble or insoluble in the medium. Where insoluble, impurities can be extracted from the polymer, leaving the polymer intact. Where soluble, the polymer can be purified in accordance with conventional methods, such as extraction or chromatography. In particular examples, supernatant or homogenized cell extract can be filtered and protein precipitated therefrom. For example, protein polymer can be precipitated by mixing a filtered solution with ammonium sulfate to 25% saturation. The precipitated product can be reconstituted with a liquid, for example, water. The precipitated polymer can be further filtered and/or purified. The product can be concentrated to a desired concentration, and generally is lyophilized to form a powder. The lyophilized powder can be stored, for example at −70° C.

[0332] Due to the ability of protein polymers to gel, protein polymers typically are prepared as powders in lyophilized form. A protein polymer solution, such as a SELP polymer solution, can be formulated into a liquid composition by dissolving a polymer or a mixture thereof in a biocompatible liquid. For example, protein polymer-containing solutions can be prepared in, for example, water, saline, phosphate buffered saline or other buffer or isotonic aqueous solution with or without other additives. Exemplary of other additives include, for example, mannitol, glucose, alcohol, vegetable oil, and the like. Faster gellation or crystallization of a liquid composition containing the protein polymer can be obtained by increasing the concentration of the polymer in the liquid. Generally, polymer compositions have a weight percentage (wt %) of from about 2% (w/w) to about 50% (w/w) of the composition being protein polymer, such as from about 5% (w/w) to about 50% (w/w), about 10% (w/w) to about 50% (w/w), about 20% (w/w) to about 35% (w/w), and generally at least about or about 20% (w/w). The specific concentration can be empirically determined by one of skill in the art and is dependent on factors such as the particular SELP, the proposed use, the time and temperature of storage and use and other factors. For example, SELP 47K has a higher silk:elastin (S:E) ratio and forms hydrogels in the concentration range 4-12 wt %, whereas SELP 415K forms hydrogels above 10 wt % concentration due to its low S:E ratio.

[0333] The resulting polymers can be characterized using methods known in the art, including for example, amino acid compositional analysis, microchemical elemental analysis, moisture analysis and characterization of gelation (see e.g. Cappello et al. (1998) Journal of Controlled Release, 53:105-117).

### E. VACCINIA VIRUS-PROTEIN POLYMER (VV-POLYMER) COMPOSITIONS

[0334] Provided herein are VV-polymer compositions containing an oncolytic virus in a protein polymer matrix or gel. For example, provided herein are VV-SELP formulations, and in particular LIVP-SELP compositions. The VV-polymer (e.g. VV-SELP) compositions provided herein include those that are liquid compositions or non-liquid compositions (e.g. gel, solid, or other form that substantially lacks the property of flow). Protein polymer compositions, such as SELP polymer-containing compositions, undergo a nonreversible crystallization event resulting in gelation. Hence, it is understood that liquid polymer compositions provided herein containing vaccinia virus (e.g. LIVP) are capable of irreversibly acquiring a non-liquid form with time or under physiological conditions (e.g., at normal body temperature after administration in vivo).

[0335] Vaccinia virus (e.g. an LIVP) in protein polymer compositions provided herein, for example SELP compositions is stable and retains viral integrity at 37° C. for at least one week (e.g. 7 days) or greater than one week. The viral integrity can be retained for at least 8 days, 9 days, 10 days, 11 days, 12 days, 13 days, two weeks, three weeks and up to a month at 37° C. The viral integrity of vaccinia virus, such as an LIVP, in a protein polymer composition provided herein is at least or greater than or about or 10%, 11%, 12%, 13%, 14%, 15%, 16%, 17%, 18%, 19%, 20%, 25%, 30%, 35%, 40%, 45%, 50%, 55%, 65%, 70%, 80%, 90%, 95% of the viral integrity of the starting virus stock prior to incubation at 37° C. By virtue of the stability, the compositions provided herein can be used to effect delivery of virus at physiologic temperatures over an extended time period. Thus, the polymers can be used in surface application, such as patch formation or wound healing applications, and also in slow release applications. In addition, the polymers also minimize or reduce antigenicity of administered virus in animals and humans. Hence, the compositions provided herein can provide protection from immune responses.

[0336] The compositions provided herein can be used in various methods known to one of skill in the art, and in particular for the therapy of tumors or treatment of wounded and inflamed tissues and cells. The VV-polymer compositions, such as VV-SELP (e.g. LIVP-SELP) compositions, can be administered or introduced to virtually any in vivo site by a number of means. Exemplary of administration techniques of the coated viruses herein include, but are not limited to, injection by syringe into a site of interest, use of trocar or catheter, surgical implantation, placement into open wounds or other cavities, or coating on a bandage, gauze or other wrap for application to a body surface. In addition, the coated viruses also can be used for systemic (e.g. intravenous), oral, intraperitoneal and intratumoral applications.

[0337] 1. Methods of Making Compositions

[0338] Vaccina virus-protein polymer compositions, such as VV-SELP compositions, can be made by methods known to one of skill in the art for generating polymer compositions capable of gelation (see e.g. U.S. Pat. No. 6,380,154;). For example, liquid polymer solutions, such as silk-elastin polymer solutions, can be mixed directly with a vaccinia virus composition or virus stock (e.g. LIVP composition). In particular examples, a silk-elastin polymer, such as any described in Section D is mixed directly with an LIVP composition, such as any described in Section C.

[0339] The components can be mixed by any method that is known to one of skill in the art, such that the resulting mixture is a liquid solution containing the components therein. Typically, the components are mixed in a biocompatible solute or liquid such as, but not limited to, water, saline, phosphate buffered saline, tris(hydroxymethyl)methylamine (Tris), minimum essential medium (MEM) or other buffer or isotonic aqueous solution. Typically, mixing occurs at temperatures less than 37° C. where gelation can quickly occur, and generally at temperatures less than 30° C. and most typically at room temperature of about or between about 20° C. to 25° C. Gentle mixing is generally desired. For example, the components can be combined at room temperature and the solution gently swirled or inverted periodically for a sufficient time to mix the components. The mixture or combination can be incubated together for at least 10 seconds, 30 seconds, 1 minute, 5 minutes, 10 minutes, 20 minutes, 30 minutes, 40 minutes, 50 minutes, 60 minutes or longer. Generally, incubation and mixing is effected in a sufficient time before the composition acquires a non-liquid form.

[0340] The resulting liquid compositions will, over time, undergo a gelation process to yield a hydrogel composition. The transition from a liquid form to a non-liquid form occurs without the need for chemical crosslinking via chemical reaction or irradiation. In this way, no chemical changes to the protein polymer composition or to any biologically active substance contained in a composition thereof will occur. The rate of gelation, solidification or crystallization can be influenced by such things as the number of protein crystallization units in the polymer (the greater the relative number of protein crystallization units, the greater the rate of acquiring a non-liquid form in vivo), the concentration of the polymer (the greater the concentration of the protein polymer in the liquid composition, the greater the rate of acquiring a non-liquid form in vivo), temperature (the greater the temperature, the greater the rate of acquiring a non-liquid form in vivo) and other solution conditions.

[0341] Further, the rate of release of the vaccinia virus from the non-liquid form can depend on the concentration of the virus, its solubility in the polymer matrix, the composition of the polymer, including the relative number of protein crystallization units present therein and the conditions under which release takes place. Polymer compositions can be selected to provide for varying rates of release (i.e., quick release or sustained release over an extended period of time). It is within one of skill in the art to test VV-polymer formualtions (e.g. VV-SELP compositions) to determine the release rate of the virus, and thereby empirically determine the particulars of the composition that are suitable for a desired application or use.

[0342] Thus, the particular percentage weight of protein polymer solution that is mixed to generate the VV-polymer compositions can be empirically determined by one of skill in the art and is a function of the particular polymer or SELP, the desired or planned use of the composition, the desired release rate of the virus from the hydrogel, the time period in which gelation is desired, the particular temperature the mixing occurs and other parameters known to one of skill in the art.

[0343] In particular examples herein, the polymer compositions are generated so that the resulting VV-polymer compositions, for example VV-SELP compositions (e.g. LIVP-SELP), has a weight percentage (wt %) of from about 2% (w/w) to about 50% (w/w) of the composition being protein polymer, such as from about 2% (w/w) to about 35% (w/w), from about 2% (w/w) to about 20% (w/w), from about 2% (w/w) to about 12% (w/w), from about 4% (w/w) to about 50% (w/w), from about 4% (w/w) to about 35% w/w, from about 4% (w/w) to about 12%, from about 4% (w/w) to about 8% (w/w), from about 5% (w/w) to about 50% (w/w), from about 10% (w/w) to about 50% (w/w), from about 20% (w/w) to about 35% (w/w), and generally at least about or about 4%, 5%, 6%, 7%, 8%, 9%, 10%, 11%, 12%, 13%, 14%, 15% or 20% (w/w). In one example, if the polymer is a SELP815K, the weight percentage of the composition being protein polymer is from about 2% (w/w) to 12% (w/w), such as 4% (w/w) to 12% (w/w), for example 4% (w/w) to 8% (w/w), and generally at least about or about or 4%. In another example, if the polymer is SELP 47K, the weight percentage of the composition being protein polymer is from about 2% (w/w) to 12% (w/w), such as 4% (w/w) to 12% (w/w), for example 4% (w/w) to 8% (w/w), and generally at least about or about or 4%. In other examples, if the polymer is SELP27K, the weight percentage of the composition being protein polymer is from about 2% (w/w) to 12% (w/w), such as 4% (w/w) to 12% (w/w), for example 4% (w/w) to 8% (w/w), and generally at least about or about or 4%. In a further example, if the polymer is SELP415K, the weight percentage of the composition being protein polymer is above 10% (w/w), and generally is about 10% (w/w) to 50% (w/w), such as 20% (w/w) to 35% (w/w).

[0344] The oncolytic vaccinia virus in polymer compositions provided herein can be generated to contain a therapeutically effective amount of vaccinia virus. For example, the polymer compositions can be generated from a virus stock solution that is 10⁵-10¹° pfu/mL, for example, 5×10⁶ to 5×10⁹ or 10⁷-10⁹ pfu/mL, such as at least or about or 10⁶ pfu/mL, 10⁷ pfu/mL, 10⁸ pfu/mL or 10⁹ pfu/mL. Upon mixing with polymer, the liquid composition can have a volume of from or from about 0.01 mL to 100 mL, such as from or from about 0.1 mL to 100 mL, 1 mL to 100 mL, 10 mL to 100 mL, 0.01 mL to 10 mL, 0.1 mL to 10 mL, 1 mL to 10 mL, 0.02 mL to 20 mL, 0.05 mL to 5 mL, 0.5 mL to 50 mL, 0.5 mL to 5 mL, for example, at least or about at least or 0.05 mL, 0.5 mL or 1 mL. In particular examples, the resulting mixed VV-polymer compositions can contain virus at a concentration of 10⁵-10¹⁰ pfu/mL, for example, 5×10⁶ to 5×10⁹ or 10⁷-10⁹ pfu/mL, such as at least or about or 10⁶ pfu/mL, 10⁷ pfu/mL, 10⁸ pfu/mL or 10⁹ pfu/mL. For example, the compositions can contain an amount of virus that is or is about 1×10⁵ to 1×10¹² pfu, such as 1×10⁶ to 1×10¹° pfu or 1×10⁷ to 1×10¹⁰ pfu, for example at least or about at least or 1×10⁶, 1×10⁷, 1×10⁸, 1×10⁹, 2×10⁹, 3×10⁹, 4×10⁹, or 5×10⁹ pfu.

[0345] Because the transition from the liquid form to a non-liquid form is mediated by hydrogen bonding occurring between protein crystallization units present in the protein polymers, compounds that inhibit hydrogen bonding can be employed to decrease the rate at which the liquid form acquires a non-liquid form. Such compounds include, for example, urea, guanidine hydrochloride, dimethyl formamide, colloidal gold sol, aqueous lithium bromide and formic acid. The concentrations of such compounds can be readily determined by one of skill in the art.

[0346] Moreover, additives that increase the rate at which the liquid composition acquires a non-liquid form also can be used when preparing the compositions. Such “nucleating agents” or “accelerators” include, for example, pre-gelled protein polymers such as the SELP or SLP protein polymers described herein or known to one of skill in the art. In particular, such polymers include SLP3 or SLP4, which are described in U.S. Pat. No. 5,243,038. Aqueous solvents also can be used including, for example, ethanol.

[0347] Also provided herein are VV-protein polymer compositions, such as VV-SELP compositions (e.g. LIVP-SELP), that are nanoparticles. Methods of generating nanoparticles are known in the art (see e.g. Anumolu et al. (2011) ACS Nano 5:5374-82; International PCT Appl. No. WO2011140024). Such methods include providing a VV-protein polymer (e.g. VV-SELP such as LIVP-SELP) solution in a solvent, forming droplets containing the VV-protein polymer and solvent and removing the solvent to produce nanoparticles. The droplets can be formed by an electrospray aerosol generator or a nebulizer. The nanoparticles generally are uniform in size. For example, on preparation of nanoparticles, nanoparticles can be separated based on size to produce nanoparticles that are substantially uniform in size. Separation can be effected by any method known in the art, for example, using a differential mobility analyzer that separates or purifies nanoparticles based on charge-to-size ratio. The size of the nanoparticles can vary depending upon reaction and solution conditions. In one aspect, the nanoparticles have a diameter from 1 nm to 250 nm, 5 nm to 200 nm, 10 nm to 100 nm, or from 10 nm to 60 nm. The size of the nanoparticles can be selected depending upon the application of the nanoparticles. Additionally, the shape of the nanoparticles can vary as well. For example, the nanoparticles can be spherical or cylindrical. Nanoparticles can be designed to carry a targeting ligand, and in particular a targeting ligand or molecule that targets the nanoparticle to the tumor cells. In one non-limiting example, nanoparticles can be coated with a radionuclide and, optionally, an antibody immunoreactive with a tumor-associated antigen.

[0348] 2. Exemplary VV-SELP Compositions

[0349] Provided herein are compositions of an oncolytic vaccinia virus in SELP polymer (VV-SELP). In particular examples, provided herein are LIVP-SELP compositions containing an LIVP virus in a SELP. The VV-SELP compositions can be liquid or can be non-liquid solid or gel compositions. It is understood that liquid compositions of VV-SELP compositions are precursor hydrogel matrix compositions and are capable of irreversibly acquiring a non-liquid form with time or under physiological conditions (e.g., at normal body temperature after administration in vivo) to generate a hydrogel matrix composition. For example, when a liquid composition is exposed to the physiological temperature of an animal (e.g. a human), it will transform into a non-liquid hydrogel form. The compositions provided herein, in particular the hydrogel compositions, effect sustained release of the virus. Further, the vaccinia virus (e.g. LIVP virus) contained in the polymer (e.g. SELP) hydrogel composition is stable and retains viral integrity for at least one week at 37° C.

[0350] Generally, liquid VV-SELP compositions provided herein exhibit sufficient working time as a liquid to allow them to be loaded into a syringe, injected, coated or applied on a bandage or other material or otherwise introduced into the body. For example, the liquid compositions provided herein generally acquire a non-liquid form in from about 30 seconds to about 500 minutes after mixing, such as from about 1 minute to about 250 minutes after mixing, and generally from about 5 minutes to about 125 minutes after mixing. The particular time can be empirically determined and is dependent on factors that include the choice of SELP polymer, the concentration or amount of virus contained therein, the conditions of mixing (e.g. temperature) and other factors that are within the level of one of skill in the art.

[0351] Included among the VV-SELP compositions provided herein are compositions containing 10⁵-10¹⁰ pfu/mL of a vaccinia virus contained in a SELP polymer that is from about 2 weight % to about 20 weight % of the composition. The vaccinia virus can be contained in a SELP polymer that is from about 2% (w/w) to about 12% (w/w), from about 4% (w/w) to about 12%, from about 4% (w/w) to about 8% (w/w), and generally at least about or about 4%, 5%, 6%, 7%, 8%, 9%, 10%, 11%, 12%, 13%, 14%, 15% or 20% (w/w). The composition can contain 5×10⁶ to 5×10⁹ or 10⁷-10⁹ pfu/mL, such as at least or about or 10⁶ pfu/mL, 10⁷ pfu/mL, 10⁸ pfu/mL or 10⁹ pfu/mL of vaccinia virus. When prepared as a liquid composition as a hydrogel matrix precursor, the liquid composition can have a volume of from or from about 0.01 mL to 100 mL, such as from or from about 0.1 mL to 100 mL, 1 mL to 100 mL, 10 mL to 100 mL, 0.01 mL to 10 mL, 0.1 mL to 10 mL, 1 mL to 10 mL, 0.02 mL to 20 mL, 0.05 mL to 5 mL, 0.5 mL to 50 mL, 0.5 mL to 5 mL, for example, at least or about at least or 0.05 mL, 0.5 mL or 1 mL. Hence, the resulting composition can contain vaccinia virus in an amount that is from or from about 1×10⁵ to 1×10¹² pfu, such as 1×10⁶ to 1×10¹⁰ pfu or 1×10⁷ to 1×10¹° pfu, for example at least or about at least or 1×10⁶, 1×10⁷, 1×10⁸, 1×10⁹, 2×10⁹, 3×10⁹, 4×10⁹, or 5×10⁹ pfu. The vaccinia virus can be any vaccinia virus known to one of skill in the art, such as any described in Section C above. In particular examples, the vaccinia virus is a Lister, Western Reserve (WR), Copenhagen (Cop), Bern, Paris, Tashkent, Tian Tan, Wyeth (DRYVAX), IHD-J, IHD-W, Brighton, Ankara, CVA382, Modified Vaccinia Ankara (MVA), Dairen I, LC16 m8, LC16M0, LIVP, ACAM2000, WR 65-16, Connaught, New York City Board of Health (NYCBH), EM-63, or NYVAC vaccinia virus, clonal strain thereof or a modified forms thereof. For example, the vaccinia virus is a modified form that contains one or more heterologous nucleic acid molecules inserted or replaced into the genome of the virus. The SELP polymer can be any polymer known to one of skill in the art, such as any described in Section D above.

[0352] Exemplary of compositions herein contain SELP-47K (SEQ ID NO:62), SELP-27K (SEQ ID NO:61) or SELP-815K (SEQ ID NO:63). For example, exemplary of VV-SELP compositions provided herein are compositions containing 10⁵-10¹⁰ pfu/mL of a vaccinia virus contained in a SELP-47K, SELP-27K or SELP-815K polymer that is from about 2 weight % to about 20 weight % of the composition. The vaccinia virus can be contained in a SELP-47K, SELP-27K or SELP-815K polymer that is from about 2% (w/w) to about 12% (w/w), from about 4% (w/w) to about 12%, from about 4% (w/w) to about 8% (w/w), and generally at least about or about 4%, 5%, 6%, 7%, 8%, 9%, 10%, 11%, 12%, 13%, 14%, 15% or 20% (w/w). The composition can contain 5×10⁶ to 5×10⁹ or 10⁷-10⁹ pfu/mL, such as at least or about or 10⁶ pfu/mL, 10⁷ pfu/mL, 10⁸ pfu/mL or 10⁹ pfu/mL of vaccinia virus. When prepared as a liquid composition as a hydrogel matrix precursor, the liquid composition can have a volume of from or from about 0.01 mL to 100 mL, such as from or from about 0.1 mL to 100 mL, 1 mL to 100 mL, 10 mL to 100 mL, 0.01 mL to 10 mL, 0.1 mL to 10 mL, 1 mL to 10 mL, 0.02 mL to 20 mL, 0.05 mL to 5 mL, 0.5 mL to 50 mL, 0.5 mL to 5 mL, for example, at least or about at least or 0.05 mL, 0.5 mL or 1 mL. Hence, the resulting composition can contain vaccinia virus in an amount that is from or from about 1×10⁵ to 1×10¹² pfu, such as 1×10⁶ to 1×10¹⁰ pfu or 1×10⁷ to 1×10¹⁰ pfu, for example at least or about at least or 1×10⁶, 1×10⁷, 1×10⁸, 1×10⁹, 2×10⁹, 3×10⁹, 4×10⁹, or 5×10⁹ pfu. The vaccinia virus can be any vaccinia virus known to one of skill in the art, such as any described in Section C above. In particular examples, the vaccinia virus is a Lister, Western Reserve (WR), Copenhagen (Cop), Bern, Paris, Tashkent, Tian Tan, Wyeth (DRYVAX), IHD-J, IHD-W, Brighton, Ankara, CVA382, Modified Vaccinia Ankara (MVA), Dairen I, LC16 m8, LC16M0, LIVP, ACAM2000, WR 65-16, Connaught, New York City Board of Health (NYCBH), EM-63, or NYVAC vaccinia virus, clonal strain thereof or a modified forms thereof. For example, the vaccinia virus is a modified form that contains one or more heterologous nucleic acid molecules inserted or replaced into the genome of the virus.

[0353] In particular examples, the VV-SELP compositions are LIVP-SELP compositions containing 10⁵-10¹° pfu/mL of an LIVP contained in a SELP polymer that is from about 2 weight % to about 20 weight % of the composition. The LIVP can be contained in a SELP polymer that is from about 2% (w/w) to about 12% (w/w), from about 4% (w/w) to about 12%, from about 4% (w/w) to about 8% (w/w), and generally at least about or about 4%, 5%, 6%, 7%, 8%, 9%, 10%, 11%, 12%, 13%, 14%, 15% or 20% (w/w). The LIVP in the compositions provided herein can be any LIVP known to one of skill in the art, including but not limited to, an LIVP containing a genome set forth in any of SEQ ID NOS:1-8, or that exhibits at least 97%, 98%, 99% or more sequence identity to any of SEQ ID NOS:1-8. For example, the LIVP is a modified or recombinant LIVP containing insertion, deletion or replacement of heterologous nucleic acid. In particular, the LIVP is a virus strain containing a modified genome of any of SEQ ID NOS:1-8, including any known in the art or as described herein above in Section C or Table 4. The composition can contain 10⁵-10¹⁰ pfu/mL, 5×10⁶ to 5×10⁹ or 10⁷-10⁹ pfu/mL, such as at least or about or 10⁶ pfu/mL, 10⁷ pfu/mL, 10⁸ pfu/mL or 10⁹ pfu/mL of LIVP, including a clonal strain or modified form thereof in a SELP polymer. When prepared as a liquid composition as a hydrogel matrix precursor, the liquid composition can have a volume of from or from about 0.01 mL to 100 mL, such as from or from about 0.1 mL to 100 mL, 1 mL to 100 mL, 10 mL to 100 mL, 0.01 mL to 10 mL, 0.1 mL to 10 mL, 1 mL to 10 mL, 0.02 mL to 20 mL, 0.05 mL to 5 mL, 0.5 mL to 50 mL, 0.5 mL to 5 mL, for example, at least or about at least or 0.05 mL, 0.5 mL or 1 mL. Hence, the resulting composition can contain an LIVP in an amount that is from or from about 1×10⁵ to 1×10¹² pfu, such as 1×10⁶ to 1×10¹⁰ pfu or 1×10⁷ to 1×10¹° pfu, for example at least or about at least or 1×10⁶, 1×10⁷, 1×10⁸, 1×10⁹, 2×10⁹, 3×10⁹, 4×10⁹, or 5×10⁹ pfu. In particular examples, the LIVP virus can be contained in a SELP polymer that is SELP-47K, SELP-27K or SELP-815K.

[0354] For example, provided herein are LIVP-SELP-47K compositions containing 10⁵-10¹⁰ pfu/mL of an LIVP contained in a SELP-47K polymer (set forth in SEQ ID NO:62) that is from about 2 weight % to about 20 weight % of the composition. The SELP-47K in the composition can have a weight percentage of from about 2% (w/w) to about 12% (w/w), from about 4% (w/w) to about 12%, from about 4% (w/w) to about 8% (w/w), and generally at least about or about 4%, 5%, 6%, 7%, 8%, 9%, 10%, 11%, 12%, 13%, 14%, 15% or 20% (w/w). The LIVP in the compositions provided herein can be any LIVP known to one of skill in the art, including but not limited to, an LIVP containing a genome set forth in any of SEQ ID NOS:1-8, or that exhibits at least 97%, 98%, 99% or more sequence identity to any of SEQ ID NOS:1-8. For example, the LIVP is a modified or recombinant LIVP containing insertion, deletion or replacement of heterologous nucleic acid. In particular, the LIVP is a virus strain containing a modified genome of any of SEQ ID NOS:1-8, including any known in the art or as described herein above in Section C or Table 4. The composition can contain 10⁵-10¹⁰ pfu/mL, 5×10⁶ to 5×10⁹ or 10⁷-10⁹ pfu/mL, such as at least or about or 10⁶ pfu/mL, 10⁷ pfu/mL, 10⁸ pfu/mL or 10⁹ pfu/mL of LIVP, including a clonal strain or modified form thereof in SELP-47K polymer When prepared as a liquid composition as a hydrogel matrix precursor, the liquid composition can have a volume of from or from about 0.01 mL to 100 mL, such as from or from about 0.1 mL to 100 mL, 1 mL to 100 mL, 10 mL to 100 mL, 0.01 mL to 10 mL, 0.1 mL to 10 mL, 1 mL to 10 mL, 0.02 mL to 20 mL, 0.05 mL to 5 mL, 0.5 mL to 50 mL, 0.5 mL to 5 mL, for example, at least or about at least or 0.05 mL, 0.5 mL or 1 mL. Hence, the resulting composition can contain an LIVP in an amount that is from or from about 1×10⁵ to 1×10¹² pfu, such as 1×10⁶ to 1×10¹⁰ pfu or 1×10⁷ to 1×10¹⁰ pfu, for example at least or about at least or 1×10⁶, 1×10⁷, 1×10⁸, 1×10⁹, 2×10⁹, 3×10⁹, 4×10⁹, or 5×10⁹ pfu.

[0355] In another example, provided herein are LIVP-SELP-27K compositions containing 10⁵-10¹⁰ pfu/mL of an LIVP contained in a SELP-27K polymer (set forth in SEQ ID NO:61) that is from about 2 weight % to about 20 weight % of the composition. The SELP-27K in the composition can have a weight percentage of from about 2% (w/w) to about 12% (w/w), from about 4% (w/w) to about 12%, from about 4% (w/w) to about 8% (w/w), and generally at least about or about 4%, 5%, 6%, 7%, 8%, 9%, 10%, 11%, 12%, 13%, 14%, 15% or 20% (w/w). The LIVP in the compositions provided herein can be any LIVP known to one of skill in the art, including but not limited to, an LIVP containing a genome set forth in any of SEQ ID NOS:1-8, or that exhibits at least 97%, 98%, 99% or more sequence identity to any of SEQ ID NOS:1-8. For example, the LIVP is a modified or recombinant LIVP containing insertion, deletion or replacement of heterologous nucleic acid. In particular, the LIVP is a virus strain containing a modified genome of any of SEQ ID NOS:1-8, including any known in the art or as described herein above in Section C or Table 4. The composition can contain 10⁵-10¹⁰ pfu/mL, 5×10⁶ to 5×10⁹ or 10⁷-10⁹ pfu/mL, such as at least or about or 10⁶ pfu/mL, 10⁷ pfu/mL, 10⁸ pfu/mL or 10⁹ pfu/mL of LIVP, including a clonal strain or modified form thereof in SELP-27K polymer. When prepared as a liquid composition as a hydrogel matrix precursor, the liquid composition can have a volume of from or from about 0.01 mL to 100 mL, such as from or from about 0.1 mL to 100 mL, 1 mL to 100 mL, 10 mL to 100 mL, 0.01 mL to 10 mL, 0.1 mL to 10 mL, 1 mL to 10 mL, 0.02 mL to 20 mL, 0.05 mL to 5 mL, 0.5 mL to 50 mL, 0.5 mL to 5 mL, for example, at least or about at least or 0.05 mL, 0.5 mL or 1 mL. Hence, the resulting composition can contain an LIVP in an amount that is from or from about 1×10⁵ to 1×10¹² pfu, such as 1×10⁶ to 1×10¹⁰ pfu or 1×10⁷ to 1×10¹⁰ pfu, for example at least or about at least or 1×10⁶, 1×10⁷,1×10⁸, 1×10⁹, 2×10⁹, 3×10⁹, 4×10⁹, or 5×10⁹ pfu.

[0356] In a further example, provided herein are LIVP-SELP-815K composition containing 10⁵-10¹⁰ pfu/mL of an LIVP contained in a SELP-815K polymer (set forth in SEQ ID NO:63) that is from about 2 weight % to about 20 weight % of the composition. The SELP-815K in the composition can have a weight percentage of from about 2% (w/w) to about 12% (w/w), from about 4% (w/w) to about 12%, from about 4% (w/w) to about 8% (w/w), and generally at least about or about 4%, 5%, 6%, 7%, 8%, 9%, 10%, 11%, 12%, 13%, 14%, 15% or 20% (w/w). The LIVP in the compositions provided herein can be any LIVP known to one of skill in the art, including but not limited to, an LIVP containing a genome set forth in any of SEQ ID NOS:1-8, or that exhibits at least 97%, 98%, 99% or more sequence identity to any of SEQ ID NOS:1-8. For example, the LIVP is a modified or recombinant LIVP containing insertion, deletion or replacement of heterologous nucleic acid. In particular, the LIVP is a virus strain containing a modified genome of any of SEQ ID NOS:1-8, including any known in the art or as described herein above in Section C or Table 4. The composition can contain 10⁵-10¹° pfu/mL, 5×10⁶ to 5×10⁹ or 10⁷-10⁹ pfu/mL, such as at least or about or 10⁶ pfu/mL, 10⁷ pfu/mL, 10⁸ pfu/mL or 10⁹ pfu/mL of LIVP, including a clonal strain or modified form thereof in SELP-27K polymer. When prepared as a liquid composition as a hydrogel matrix precursor, the liquid composition can have a volume of from or from about 0.01 mL to 100 mL, such as from or from about 0.1 mL to 100 mL, 1 mL to 100 mL, 10 mL to 100 mL, 0.01 mL to 10 mL, 0.1 mL to 10 mL, 1 mL to 10 mL, 0.02 mL to 20 mL, 0.05 mL to 5 mL, 0.5 mL to 50 mL, 0.5 mL to 5 mL, for example, at least or about at least or 0.05 mL, 0.5 mL or 1 mL. Hence, the resulting composition can contain an LIVP in an amount that is from or from about 1×10⁵ to 1×10¹² pfu, such as 1×10⁶ to 1×10¹⁰ pfu or 1×10⁷ to 1×10¹⁰ pfu, for example at least or about at least or 1×10⁶, 1×10⁷, 1×10⁸, 1×10⁹, 2×10⁹, 3×10⁹, 4×10⁹, or 5×10⁹ pfu.

[0357] 3. Dosage Forms, Carriers and Excipients

[0358] The compositions provided herein can be formulated for administration by any available route known in the art. The composition should suit the mode of administration. Administration can be local, topical or systemic depending upon the locus of treatment. Local administration to an area in need of treatment can be achieved by, for example, but not limited to, local injection (e.g. intratumoral), or by topical application, e.g. in conjunction with a wound dressing after surgery.

[0359] The compositions can be provided as a liquid, hydrogel or lyophilized compositions. Typically, VV-SELP compositions are initially formulated and prepared as liquid compositions that are hydrogel matrix precursor, which eventually form hydrogels. As described above, the liquid compositions are prepared by mixing polymer solutions, for example SELP solutions, with virus. The liquid compositions provided herein generally retain aqueous or fluid properties for 30 seconds to 1 hour, and generally 1 minute to 40 minutes or 5 minutes to 30 minutes. Hence, such compositions are typically used immediately shortly after preparation. In some examples, the liquid compositions can be administered to a subject by any injectable route of administration, including but not limited to, intravenous, intratumoral, subcutaneous, intraperitoneal, intradermal or other route. In particular examples herein, the liquid compositions are formulated for intravenous administration. For example, the solutions can be injected through fine gauge hypodermic needles. In other examples, the liquid compositions can be topically applied directly to a wound, tumor or other site of injury or disease, or to a bandage or other similar article. Because the compositions can acquire a non-liquid form with time or under various physiologic conditions, they are useful for releasing the virus incorporated therein to the systemic circulation or to a localized site (e.g. directly to a tumor or wound).

[0360] It is understood that liquid or aqueous compositions herein are hydrogel precursor compositions. For example, a hydrogel composition is generated upon delivery, administration or exposure of the liquid composition to the physiologic temperature (e.g. 34° C. to 37° C.) of a body location. Thus, in one example, administration of a composition provided herein formulated as a liquid composition for direct intravenous injection is a hydrogel precursor and will transform to a non-liquid hydrogel upon administration to the systemic environment tof the body. In another example, administration of a composition provided herein formulated as a liquid formation for topical application to a wound or other skin lesion will transform to a non-liquid hydrogel upon exposure to the physiologic temperature of the skin.

[0361] Compositions, including liquid preparations, can be prepared by conventional means with pharmaceutically acceptable additives or excipients. Where the compositions are provided in lyophilized form they can be reconstituted just prior to use by an appropriate buffer, for example, a sterile saline solution.

Pharmaceutically acceptable compositions are prepared in view of approvals for a regulatory agency or other agency prepared in accordance with generally recognized pharmacopeia for use in animals and in humans. The compositions can be formulated for single dosage administration or for multiple dosage administration. The compositions can be formulated for direct administration.

[0362] For example, any of the compositions provided can contain a physiologically acceptable carrier or excipient. Examples of suitable pharmaceutical carriers are known in the art and include, but are not limited to, water, buffers, saline solutions, phosphate buffered saline solutions, various types of wetting agents, sterile solutions, alcohols, gum arabic, vegetable oils, benzyl alcohols, gelatin, glycerin, carbohydrates, such as lactose, sucrose, dextrose, amylose or starch, sorbitol, mannitol, magnesium stearate, talc, silicic acid, viscous paraffin, perfume oil, fatty acid monoglycerides and diglycerides, pentaerythritol fatty acid esters, hydroxy methylcellulose, powders, among others. Pharmaceutical compositions provided herein can contain other additives including, for example, antioxidants, preserving agents, analgesic agents, binders, disintegrants, coloring, diluents, excipients, extenders, glidants, solubilizers, stabilizers, tonicity agents, vehicles, viscosity agents, flavoring agents, sweetening agents, emulsions, such as oil/water emulsions, emulsifying and suspending agents, such as acacia, agar, alginic acid, sodium alginate, bentonite, carbomer, carrageenan, carboxymethylcellulose, cellulose, cholesterol, gelatin, hydroxyethyl cellulose, hydroxypropyl cellulose, hydroxypropyl methylcellulose, methylcellulose, octoxynol 9, oleyl alcohol, povidone, propylene glycol monostearate, sodium lauryl sulfate, sorbitan esters, stearyl alcohol, tragacanth, xanthan gum, and derivatives thereof, solvents, and miscellaneous ingredients, such as, but not limited to, crystalline cellulose, microcrystalline cellulose, citric acid, dextrin, liquid glucose, lactic acid, lactose, magnesium chloride, potassium metaphosphate, starch, among others. Such carriers and/or additives can be formulated by conventional methods and can be administered to the subject at a suitable dose. Stabilizing agents such as lipids, nuclease inhibitors, polymers, and chelating agents can preserve the compositions from degradation within the body. Other suitable compositions for use in a pharmaceutical compositions can be found, for example, in Remington: The Science and Practice of Pharmacy (2005, Twenty-first edition, Gennaro & Gennaro, eds., Lippencott Williams and Wilkins).

[0363] Parenteral administration, generally characterized by injection or infusion, either subcutaneously, intramuscularly, intravenous or intradermally is contemplated herein. In particular examples, the compositions are formulated for intravenous administration. Preparations for parenteral administration include sterile solutions ready for injection, sterile dry soluble products, such as lyophilized powders, ready to be combined with a solvent just prior to use, sterile suspensions ready for injection, sterile dry insoluble products ready to be combined with a vehicle just prior to use and sterile emulsions. For example, lyophilized compositions can be prepared. In such examples, the hydrogel composition is dried to generate a lyophilized from. The dried hydrogel matrix can be re-hydrated by resuspension in an aqueous solution.

[0364] Injectables can be prepared in conventional forms, either as liquid solutions or suspensions, solid forms suitable for solution or suspension in liquid prior to injection, or as emulsions. The compositions provided herein can be formulated in an aqueous solutions, such as in a physiologically compatible buffer. Exemplary parenteral vehicles or buffers include, but are not limited to, Hanks' solution, Ringer's solution, or physiological saline buffer, phosphate buffered saline (PBS), a sodium chloride solution, Ringer's dextrose, dextrose and sodium chloride, lactated Ringer's or fixed oils. For example, suitable carriers include solutions containing thickening and solubilizing agents, such as glucose, polyethylene glycol, and polypropylene glycol and mixtures thereof. The concentration of the pharmaceutically active compound is adjusted so that an injection or infusion provides an effective amount to produce the desired pharmacological effect.

[0365] In other examples, the compositions provided herein are formulated for topical administration. Topical mixtures are prepared as described for local and systemic administration. The resulting mixture can be a solution, suspension or emulsions and are formulated as creams, gels, ointments, emulsions, solutions, elixirs, lotions, suspensions, tinctures, pastes, foams, aerosols, irrigations, sprays, suppositories, bandages, dermal patches or any other compositions suitable for topical administration. The compounds can be formulated for local or topical application, such as for topical application to the skin and mucous membranes, in the form of gels, creams, and lotions. Topical administration is contemplated for transdermal delivery. Compositions suitable for transdermal administration are provided. They can be provided in any suitable format, such as discrete patches, dressings, bandages, wraps, film or other similar article adapted to remain in intimate contact with the epidermis of the recipient for a prolonged period of time. For example, sustained release of a composition provided herein can be performed, for example, using a drug delivering bandage, i.e. putting a thin slab of the liquid, semi-solid or solid polymer gel (e.g., a hydrogel) onto the skin, covered by a suitable bandage for prevention of movement and dehydration, and allowing sustained drug delivery from the matrix and through the skin.

[0366] The viscosity of the liquid or non-liquid composition can be adjusted or chosen depending on the particular use or mode of administration of the composition. Generally, the compositions provided herein exhibit a range of viscosities, depending on the temperature. At lower temperatures, the hydrogen bonding between water molecules and polymer become unfavorable, while at increasing temperatures it is favored. Thus, polymer compositions provided herein are generally aqueous and exhbit a low viscosity at ambient temperatures (e.g. at temperatures of from or from about 21° C. to 27° C., such as at least or about or no more than 25° C.). The viscosity of the composition increases with increased in temperature, generally forming a semi-solid or solid gel at physiologic or body temperature. In addition to temperature, the particular viscosity of the composition can be affected by the particular SELP in the composition, the weight percentage of SELP, the amount or concentration of virus contained therein, and/or the presence of agents that increase or decrease the rate at which the liquid form acquires a non-liquid form (e.g. urea and other agents described herein or known in the art). Exemplary compositions provided herein can have a viscosity of from between or about between 1 centipoise (cp) to 2,000,000 cp, for example, 50 to 100 cp (e.g. like Mazola corn oil), 150 to 200 cp (e.g. like maple syrup), 250 to 500 cp (e.g. like castor oil); 1,000 to 2,000 cp (e.g. like glycerin), 2,000 to 3,000 cp (e.g. like honey), 5,000 to 10,000 cp (e.g. like molasses), 10,000 to 25,000 cp (e.g. like hershey chocolate syrup), 50,000 to 70,000 cp (e.g. like mustard), 150,000 to 250,000 cp (e.g. like peanut butter), 1,000,000 to 2,000,000 cp (e.g. like lard).

[0367] For example, when the composition is formulated as a liquid composition for administration as a hydrogel precursor for direct injection using a device having a narrow channel (e.g. a needle, cannula, or piece of flexible or narrow bore tubing), the composition should be in a liquid or easily-deformable form. As noted above, it is within the level of one of skill in the art to prepare a liquid composition to retain aqueous or fluid properties for a sufficient period of time depending on the particular application. Typically, liquid compositions provided herein retain aqueous or fluid properties for from at least or about at least 30 seconds to 1 hour, and generally 1 minute to 40 minutes or 5 minutes to 30 minutes at ambient temperatures.

[0368] In another example, when the hydrogel precursor mixture is prepared to use in generating gels, including semi-solid and solid forms (e.g. to prepare or coat devices), the mixture can be prepared to have a higher viscosity to retain its geometerical form after generation of the matrix but prior to formation of the hydrogel matrix. The viscosity of the mixture can even be sufficiently high that the mixtrure retains its geometrical form regardless of whether it is suspended in an aqueous liquid. Hence, the hydrogel matrix precursor or hydrogel can be a viscoscity that is like glycerine or is substantially rigid. Generally, the viscosity is such that the composition can be easily spread, coated or applied on the surface of the body or on the surface of a device or other material. It is within the level of one of skill in the art to prepare a composition having any desired viscosity for the desired application, in particular by varying the particular protein polymer (e.g. SELP) or its weight percentage. Upon exposure to physiologic temperatures or body temperatures, the viscosity of the composition can increase further to form a semi-solid or solid gel form.

[0369] 4. Combinations

[0370] Provided herein are combinations of a VV-protein polymer composition, such as a VV-SELP (e.g. LIVP-SELP), and a second agent. The second agent can be a second virus or virus in polymer composition or other therapeutic or diagnostic agent. For example, the second agent can be a therapeutic compound, a therapeutic or diagnostic virus, an antiviral or chemotherapeutic agent or an agent or compound for modulation of gene expression of endogenous or heterologous genes encoded by to virus.

[0371] Combinations provided herein can contain a VV-protein polymer (e.g. VV-SELP or LIVP-SELP) composition provided herein and a therapeutic compound. Therapeutic compounds for the combinations provided herein can be, for example, an anti-cancer or chemotherapeutic compound. Exemplary therapeutic compounds include, for example, cytokines, growth factors, photosensitizing agents, radionuclides, toxins, siRNA molecules, enzyme/pro E drug pairs, anti-metabolites, signaling modulators, anti-cancer antibiotics, anti-cancer antibodies, angiogenesis inhibitors, chemotherapeutic compounds, antimetastatic compounds or a combination of any thereof. Viruses provided herein can be combined with an anti-cancer compound, such as a platinum coordination complex. Exemplary platinum coordination complexes include, for example, cisplatin, carboplatin, oxaliplatin, DWA2114R, NK121, IS 3 295, and 254-S. Exemplary chemotherapeutic agents also include, but are not limited to, methotrexate, vincristine, adriamycin, non-sugar containing chloroethylnitrosoureas, 5-fluorouracil, mitomycin C, bleomycin, doxorubicin, dacarbazine, taxol, fragyline, Meglamine GLA, valrubicin, carmustine, polifeprosan, MM 1270, BAY 12-9566, RAS farnesyl transferase inhibitor, farnesyl transferase inhibitor, MMP, MTA/LY231514, lometrexol/LY264618, Glamolec, CI-994, TNP-470, Hycamtin/topotecan, PKC412, Valspodar/PSC833, Novantrone/mitoxantrone, Metaret/suramin, BB-94/batimastat, E7070, BCH-4556, CS-682, 9-AC, AG3340, AG3433, Incel/VX-710, VX-853, ZD0101, IS1641, ODN 698, TA 2516/marimastat, BB2516/marimastat, CDP 845, D2163, PD183805, DX8951f, Lemonal DP 2202, FK 317, picibaniil/OK-432, valrubicin/AD 32, strontium-89/Metastron, Temodal/temozolomide, Yewtaxan/paclitaxel, Taxol/paclitaxel, Paxex/paclitaxel, Cyclopax/oral paclitaxel, Xeloda/capecitabine, Furtulon/doxifluridine, oral taxoids, SPU-077/cisplatin, HMR 1275/flavopiridol, CP-358 (774)/EGFR, CP-609 (754)/RAS oncogene inhibitor, BMS-182751/oral platinum, UFT (Tegafur/Uracil), Ergamisol/levamisole, Campto/levamisole, Eniluracil/776C85/5FU enhancer, Camptosar/irinotecan, Tomudex/raltitrexed, Leustatin/cladribine, Caelyx/liposomal doxorubicin, Myocet/liposomal doxorubicin, Doxil/liposomal doxorubicin, Evacet/liposomal doxorubicin, Fludara/fludarabine, Pharmorubicin/epirubicin, DepoCyt, ZD 1839, LU 79553/Bis-Naphthalimide, LU 103793/Dolastain, Gemzar/gemcitabine, ZD 0473/Anormed, YM 116, Iodine seeds, CDK4 and CDK2 inhibitors, PARP inhibitors, D4809/dexifosfamide, Ifex/Mesnex/ifosfamide, Vumon/teniposide, Paraplatin/carboplatin, Platinol/cisplatin, VePesid/Eposin/Etopophos/etoposide, ZD 9331, Taxotere/docetaxel, prodrugs of guanine arabinoside, taxane analogs, nitrosoureas, alkylating agents such as melphalan and cyclophosphamide, aminoglutethimide, asparaginase, busulfan, carboplatin, chlorambucil, cytarabine HCl, dactinomycin, daunorubicin HCl, estramustine phosphate sodium, etoposide (VP16-213), floxuridine, fluorouracil (5-FU), flutamide, hydroxyurea (hydroxycarbamide), ifosfamide, interferon alfa-2a, interferon alfa-2b, leuprolide acetate (LHRH-releasing factor analogue), lomustine (CCNU), mechlorethamine HCl (nitrogen mustard), mercaptopurine, mesna, mitotane (o,p′-DDD), mitoxantrone HCl, octreotide, plicamycin, procarbazine HCl, streptozocin, tamoxifen citrate, thioguanine, thiotepa, vinblastine sulfate, amsacrine (m-AMSA), azacitidine, erythropoietin, hexamethylmelamine (HMM), interleukin 2, mitoguazone (methyl-GAG; methyl glyoxal bis-guanylhydrazone; MGBG), pentostatin (2′ deoxycoformycin), semustine (methyl-CCNU), teniposide (VM-26) and vindesine sulfate. Additional exemplary therapeutic compounds for the use in pharmaceutical compositions and combinations provided herein can be found elsewhere herein (see e.g., Section H.3 for exemplary cytokines, growth factors, photosensitizing agents, radionuclides, toxins, siRNA molecules, enzyme/pro-drug pairs, anti-metabolites, signaling modulators, anti-cancer antibiotics, anti-cancer antibodies, angiogenesis inhibitors, and chemotherapeutic compounds).

[0372] Other exemplary therapeutic compounds include, for example, compounds that are substrates for enzymes encoded and expressed by the virus, or other therapeutic compounds provided herein or known in the art to act in concert with a virus. For example, the virus can express an enzyme that converts a prodrug into an active chemotherapy drug for killing the cancer cell. Hence, combinations provided herein can contain a therapeutic compound, such as a prodrug. An exemplary virus/therapeutic compound combination can include a virus encoding Herpes simplex virus thymidine kinase with the prodrug ganciclovir. Additional exemplary enzyme/pro-drug pairs, for the use in combinations provided include, but are not limited to, varicella zoster thymidine kinase/ganciclovir, cytosine deaminase/5-fluorouracil, purine nucleoside phosphorylase/6-methylpurine deoxyriboside, beta lactamase/cephalosporin-doxorubicin, carboxypeptidase G2/4-[(2-chloroethyl)(2-mesyloxyethyl)amino]benzoyl-L-glutamic acid, cytochrome P450/acetominophen, horseradish peroxidase/indole-3-acetic acid, nitroreductase/CB 1954, rabbit carboxylesterase/7-ethyl-10-[4-(1-piperidino)-1-piperidino]carbonyloxycamptothecin (CPT-11), mushroom tyrosinase/bis-(2-chloroethyl)amino-4-hydroxyphenylaminomethanone 28, beta galactosidase/1-chloromethyl-5-hydroxy-1,2-dihydro-3H-benz[e]indole, beta glucuronidase/epirubicin-glucuronide, thymidine phosphorylase/5′-deoxy-5-fluorouridine, deoxycytidine kinase/cytosine arabinoside, beta-lactamase and linamerase/linamarin. Additional exemplary prodrugs, for the use in combinations can also be found elsewhere herein (see e.g., Section H.3). Any of a variety of known combinations provided herein or otherwise known in the art can be included in the combinations provided herein.

[0373] In some examples, the combination can include compounds that can kill or inhibit viral growth or toxicity. Such compounds can be used to alleviate one or more adverse side effects that can result from viral infection (see, e.g. U.S. Patent Pub. No. US 2009-016228-A1). Combinations provided herein can contain antibiotic, antifungal, anti-parasitic or antiviral compounds for treatment of infections. In some examples, the antiviral compound is a chemotherapeutic agent that inhibits viral growth or toxicity. Exemplary antibiotics which can be included in a combination with a virus provided herein include, but are not limited to, ceftazidime, cefepime, imipenem, aminoglycoside, vancomycin and antipseudomonal β-lactam. Exemplary antifungal agents which can be included in a combination with a virus provided herein include, but are not limited to, amphotericin B, dapsone, fluconazole, flucytosine, griseofulvin, itraconazole, ketoconazole, miconazole, clotrimazole, nystatin, and combinations thereof. Exemplary antiviral agents can be included in a combination with a virus provided herein include, but are not limited to, cidofovir, alkoxyalkyl esters of cidofovir (CDV), cyclic CDV, and (S)-9-(3-hydroxy-2 phosphonylmethoxypropyl)adenine, 5-(dimethoxymethyl)-2′-deoxyuridine, isatin-beta-thiosemicarbazone, N-methanocarbathymidine, brivudine, 7-deazaneplanocin A, ST-246, Gleevec, 2′-beta-fluoro-2′,3′-dideoxyadenosine, indinavir, nelfinavir, ritonavir, nevirapine, AZT, ddI, ddC, and combinations thereof. Typically, combinations with an antiviral agent contain an antiviral agent known to be effective against the virus of the combination. Exemplary antiviral compounds include, for example, cidofovir, alkoxyalkyl esters of cidofovir, ganciclovir, acyclovir, ST-246, Gleevec, and derivatives thereof.

[0374] In some examples, the combination can include a detectable compound. A detectable compound can include, for example, a ligand, substrate or other compound that can interact with and/or bind specifically to a protein or RNA encoded and expressed by the virus, and can provide a detectable signal, such as a signal detectable by tomographic, spectroscopic, magnetic resonance, or other known techniques. In some examples, the protein or RNA is an exogenous protein or RNA. In some examples, the protein or RNA expressed by the virus modifies the detectable compound where the modified compound emits a detectable signal. Exemplary detectable compounds can be, or can contain, an imaging agent such as a magnetic resonance, ultrasound or tomographic imaging agent, including a radionuclide. The detectable compound can include any of a variety of compounds as provided elsewhere herein or are otherwise known in the art. Exemplary proteins that can be expressed by the virus and a detectable compound combinations employed for detection include, but are not limited to luciferase and luciferin, β-galactosidase and (4,7,10-tri(acetic acid)-1-(2-β-galactopyranosylethoxy)-1,4,7,10-tetraazacyclododecane) gadolinium (Egad), and other combinations known in the art.

[0375] In some examples, the combination can include a gene expression modulating compound that regulates expression of one or more genes encoded by the virus. Compounds that modulate gene expression are known in the art, and include, but are not limited to, transcriptional activators, inducers, transcriptional suppressors, RNA polymerase inhibitors and RNA binding compounds such as siRNA or ribozymes. Any of a variety of gene expression modulating compounds known in the art can be included in the combinations provided herein. Typically, the gene expression modulating compound included with a virus in the combinations provided herein will be a compound that can bind, inhibit or react with one or more compounds, active in gene expression such as a transcription factor or RNA of the virus of the combination. An exemplary virus/expression modulator combinations can be a virus encoding a chimeric transcription factor complex having a mutant human progesterone receptor fused to a yeast GALA DNA-binding domain an activation domain of the herpes simplex virus protein VP16 and also containing a synthetic promoter containing a series of GAL4 recognition sequences upstream of the adenovirus major late E1B TATA box, where the compound can be RU486 (see, e.g., Yu et al., (2002) Mol Genet Genomics 268:169-178). A variety of other virus/expression modulator combinations known in the art also can be included in the combinations provided herein.

[0376] In some examples, the combination can contain one or more additional therapeutic and/or diagnostic viruses or other therapeutic and/or diagnostic microorganism (e.g. therapeutic and/or diagnostic bacteria) for diagnosis or treatment. Exemplary therapeutic and/or diagnostic viruses are known in the art and include, but are not limited to, therapeutic and/or diagnostic poxviruses, herpesviruses, adenoviruses, adeno-associated viruses, and reoviruses.

[0377] 5. Kits

[0378] The VV-protein polymer (e.g. a VV-SELP or LIVP-SELP) compositions, or components thereof, can be packaged as kits. For example, provided herein are kits for making or generating the compositions provided herein. The kits can include a polymer protein (e.g. a SELP protein), a vaccinia virus and optionally instructions for preparing the polymer compositions herein by mixture of the polymer protein and vaccinia virus. In the provided kit, the polymer protein and/or vaccinia virus are provided as separate compositions for mixture together. The polymer protein and vaccinia virus can be provided in a dried or concentrated suspension or in a suspension containing the compounds at the concentration for use.

[0379] Kits can optionally include one or more components such as instructions for use, devices and additional reagents, and components, such as tubes, containers, syringes and other devices for practice of the methods. For example, optionally, the kit also can contain an aqueous solution such as a solvent or buffer for supending or dissolving the agents, a device for detecting a virus in a subject, a device for administering the virus to a subject, or a device for administering an additional agent or compound to a subject. Exemplary devices include, but are not limited to, a hypodermic needle, an intravenous needle, a catheter, a needle-less injection device, an inhaler and a liquid dispenser, such as an eyedropper. For example, a kit containing a composition, or components to generate a composition, to be delivered systemically, for example, by intravenous injection, can be included in a kit with a hypodermic needle and syringe. In another example, a kit containing a composition, or components to generate a composition, to be delivered topically can contain a device (e.g. a bandage or dressing) for applying or coating the composition, an applicator for applying the composition (e.g. disposable or reusable) The kit optionally can include a pharmaceutical carrier for combination with the composition prior to administering the composition to an animal subject and/or an additional therapeutic agent for administering in combination with the prepared composition. In addition to instructional materials for preparing the hydrogel mixture, the kit also can optionally include instructions for methods of using or administering the composition or device to an animal subject.

[0380] In one example, a kit can contain instructions. Instructions typically include a tangible expression describing the virus, describing the polymer and/or describing the generation of the compositions herein and, optionally, other components included in the kit, and methods for administration, including methods for determining the proper state of the subject, the proper dosage amount, and the proper administration method, for administering the virus. Instructions can also include guidance for monitoring the subject over the duration of the treatment time.

### F. DEVICES AND ARTICLES OF MANUFACTURE

[0381] The compositions provided herein can be used to make, prepare or to coat a device that is to be applied to a surface of the body of a animal (e.g. human) or that is to be inserted with the body of an animal (e.g. a human). Hence, provided herein are devices prepared from any of the protein polymer hydrogel compositions containing a vaccinia virus (e.g. an LIVP) provided herein in Section E. In other examples, provided herein are devices having a surface coated with any of the protein polymer hydrogel compositions containing a vaccinia virus (e.g. an LIVP virus) provided herein in Section E. In particular, the hydrogel composition is a SELP hydrogel. The device can be an implantable device or other device that is amenable to providing the VV-SELP hydrogel composition to physiologic environment of an animal (e.g. human). Exemplary of such devices include, but are not limited to, suture, dressing, bandage, film, mesh, suture, shunt or other implantable device.

[0382] The devices are prepared by forming the device from or coating the device with a composition provided herein. For example, a thin slab of a liquid composition can be coated onto a bandage, wrap or other dressing. Thereafter, the device (e.g. bandage, wrap or other dressing) can be exposed to physiologic temperature where the hydrogel will form. This can be achieved by applying the bandage or other device to the site of a wound or other skin lesion. This also can be achieved prior to applying the bandage or other device to a subject by heating or warming the device ex vivo.

[0383] In particular examples, the compositions provided herein can be used to coat virtually any medical device. The coated devices provide a convenient means for local administration of the vaccinia virus in polymer composition. For example, the compositions can be used to coat degradable and non-degradable sutures, orthopedic prostheses such as supporting rod implants, joint prostheses, pins for stabilizing fractures, bone cements and ceramics, tendon reconstruction implants, ligament reconstruction implants, cartilage substitutes, prosthetic implants, cardiovascular implants such as heart valve prostheses, pacemaker components, defibrillator components, angioplasty devices, intravascular stents, acute and in-dwelling catheters, ductus arteriosus closure devices, implants deliverable by cardiac catheters such as atrial and ventricular septal defect closure devices, urologic implants such as urinary catheters and stents, neurosurgical implants such as neurosurgical shunts, ophthalmologic implants such as lens prosthesis, thin ophthalmic sutures, and corneal implants, dental prostheses, tissue scaffolds (particularly soft tissue scaffolds), internal and external wound dressings such as bandages and hernia repair meshes, and other devices and implants known to one of skill in the art.

[0384] For example, the device having a surface coated with a composition provided herein is a suture. Typically, these devices are coated with a hydrogel matrix containing a vaccina virus (e.g. an LIVP). Sutures that can be coated include any suture of natural or synthetic origin. Typical suture materials include, by way of example and not limitation, silk, cotton, linen, polyolefins such as polyethylene and polypropylene, polyesters such as polyethylene terephthalate, homopolymers and copolymers of hydroxycarboxylic acid esters, plain or chromicized collagen, plain or chromicized catgut, and suture substitutes such as cyanoacrylates. The sutures can take any convenient form such as braids or twists, and can have a wide range of sizes, such as are commonly employed in the art.

[0385] In particular examples, the material or device is a patch, such as a dressing, bandage, wrap, dressing a film, a mesh. Bandages, films, dressing, meshes and other similar device can be include any device known in the art or capable of being used as a wound dressing.

### G. ASSAYS TO ASSESS VIRUS ACTIVITY OR COMPOSITION PROPERTIES

[0386] The compositions provided herein as a hydrogel matrix or a liquid hydrogel precursor matrix can be tested to determine the viral integrity, stability or infectivity of the vaccinia virus contained therein. Assays also can be performed to assess the diffusion or release of the virus therefrom. Assays also can be performed to assess the therapeutic efficacy of the virus, and in particular its anti-tumorigenicity or toxicity/safety. Such assays are well known in the art, and exemplary of such assays are described herein.

[0387] 1. Characterization of Hydrogel Compositions

[0388] The gelling behavior, swelling, mechanical strength and other properties of virus contained in protein polymer compositions provided herein can be assessed. Methods to assess or evaluate the gelling behavior of protein polymer matrix compositions, in particular SELP compositions, are known in the art (see e.g. Megeed et al. (2002) Advanced Drug Delivery Reviews, 54:1075-1091; Cappello et al. (1998) Journal of Controlled Release, 53:105-117). Such methods include, but are not limited to, differential scanning calorimetry (DSC; e.g. modulated DSC, for example, model MDSC 2920, TA, Instruments, DE) and rotational viscometry (e.g. using a cone and plate viscometer, for example, Brookfield Syncro-Lectric rotational viscometer; Brookfield Engineering Laboratories). Rheology studies, for example using a rheometer, also can be performed to assess changes in viscosity upon matrix formation.

[0389] In addition, the degree of swelling in water also can be determined, which is a property of the hydrogels (Sudipto et al. (2002) Journal of Microelctromechanical Systems, 11:544; Dinerman et al. (2002) Biomaterials, 23:4203-4210; Gutafson et al. (2010) Advanced Drug Delivery Reviews, 62:1509-1523)). Swelling of the hydrogels can be influenced by the interaction and cross-linking of the polymer side chains, such that reduced or decreased interaction results in a higher degree of swelling. The hydrogel swelling ratio (q) is a measure of the weight of a hydrated hydrogel divided by its dry weight. Generally, hydrogel compositions exhibit a swelling ratio that is less than 16, 15, 14, 13, 12, 11, 10, 9, 8, 7, 6, 5 or less. The temperature dependence of the swelling ratio can also be assessed, since some protein polymer compositions can exhibit temperature-dependent swelling.

[0390] The mechanical strength of the protein polymer hydrogels also can be evaluated. Methods to assess or evaluate the mechanical strength of protein polymer matrix compositions, in particular SELP compositions, are known in the art (see e.g. Gutafson et al. (2010) Advanced Drug Delivery Reviews, 62:1509-1523). Such methods include measurements of the shear modulus (i.e. the ability of a material to resist shear strain under exposure to shear stress, for example, using cone and plate rheology); measurement of the storage modulus using dynamic mechanic analysis (DMA) at various strain rates and frequencies; and small-angle neutron scattering (SANS).

[0391] The rate of gelation or hydrogel formation, swelling or mechanical strength of the compositions herein can be evaluated based on factors such as the particular protein polymer (e.g. SELP) in the composition, including the number of protein polymers (e.g. the number of silk-liked blocks contained in the polymer), molecular weight and weight percentage of the composition; the presence and effect of virus in the composition, including the amount of virus in the composition; the effect of the temperature on gelation; the time to gelation (i.e. cure time); the pH; ionic strength and/or the effect of any additives or excipients on gelation. It is within the level of one of skill in the art to empirically adjust various parameters to optimize the particular virus in protein polymer composition depending on its particular application or use.

[0392] 2. Evaluation of Virus Diffusion or Release

[0393] The release or release rate of virus contained in protein polymers also can be assessed. Such methods also are known in the art (see e.g. Hatefi et al. (2006) Molecular Therapy, 13:S205). For example, hydrogel forms of virus in protein polymer compositions can be incubated in a solution (e.g. a physiological buffer, such as phosphate buffered saline) for a period of time and at a temperature (e.g. 37° C.), and virus release therefrom can be monitored. In particular examples, virus in protein polymer hydrogel samples are already formed, and gel discs of a known volume (e.g. 0.02 to 0.1 cm³ or 20 μL to 100 μL) can be excised and plated in an elution tube with a physiologic buffer and incubated at 37° C. Samples from the incubated solutions can be taken at various intervals or predetermined time points. The amount of virus in the sample can be assessed by various methods known to one of skill in the art, for example, by standard plaque assay or extraction of DNA and quantification using RT-PCR. In some examples, viruses containing or expressing a detectable moiety or a moiety capable of detection also can be used to measure the release or release rate of virus. For example, a fluorometer can be used to measure fluorescence emission from the sample if the virus is one that expresses a fluorescent protein. The amount of virus remaining in the gel at termination of the analysis also can be determined by dissolving the gel. For example, the gel can be dissolved in 88% formic acid, neutralized to pH 7.4 with sodium hydroxide.

[0394] The results can be compared to a known standard curve to determine the number of virus particles released over time. Also, the rate of release can be monitored by comparing the amount of virus in the sample as a function of time. Viral integrity of the released virus also can be assessed to ensure that it remains bioactive after release from the hydrogel (discussed below).

[0395] It is within the level of one of skill in the art to empirically adjust various parameters to optimize the release or release rate of virus in protein polymer composition depending on its particular application or use. For example, a protein polymer composition can be chosen that permits a time-dependent rate of release of virus such that virus is steadily released over the course of several days or up to a week or more. In one example, a protein polymer composition is chosen that effects release of greater than 50%, 60%, 70%, 80%, 90% or 100% of the loaded virus within 7 days, 8 days, 9 days, 10 days, 11 days, 12 days, 13 days or 14 days. Generally, 100% of the loaded virus is not released over the first few hours or days, but is steadily released over the course of one day, two days, three days, four days, five days, six days seven days or more. For example, protein polymer compositions can be chosen that release no more than 50%, 40%, 30%, 20%, 10%, 5% or less of virus within the first 24 hours.

[0396] 3. Evaluation of Viral Integrity

[0397] The virus integrity of virus contained in protein polymers can be assessed.

[0398] Any assay that is capable of assessing infectivity of a virus can be used. Exemplary of such assays for assessing viral integrity or infectivity is assessment of viral titer by a standard plaque assay or the expression of a viral gene expression or replication after infection of a tumor cell line or other permissive cell. Such assays are known to one of skill in the art, and exemplary of such assays are described below. In particular, as described below, various tumor cell lines or other permissive cell lines are known to one of skill in the art and can be used in such assays to assess viral integrity over time in hydrogel compositions herein. For purposes of assessing viral integrity, the hydrogel forms of the virus in protein polymer compositions are incubated over time and at physiologic temperatures to determine if virus contained therein remains viable. Typically, virus in protein polymer compositions provided herein, for example VV-SELP such as LIVP-SELP compositions, are stable at physiologic temperatures (e.g. 34° C. to 37° C.) for at least one week and up to four weeks or more, and are stable at room temperature for even longer. For example, the viral integrity of vaccinia virus, such as an LIVP, in a protein polymer composition provided herein is at least or greater than or about or 10%, 11%, 12%, 13%, 14%, 15%, 16%, 17%, 18%, 19%, 20%, 25%, 30%, 35%, 40%, 45%, 50%, 55%, 65%, 70%, 80%, 90%, 95% of the viral integrity of the starting virus stock prior to incubation at 37° C.

[0399] In one example, for testing a virus that is in a hydrogel matrix, the matrix can be degraded prior to testing of the virus therein. For example, the matrix can be degraded either by providing an enzyme having matrix-degrading activity (e.g. elastase) or by physically degrading or dissolving the matrix by crushing, grinding, or by incubation with acid (e.g. 88% formic acid, neutralized to pH 7.4 with sodium hydroxide). The non-matrix virus-containing portion of the sample can be separated therefrom, and the sample can be assessed and used to transfect or infect permissive cells or tumor cells. A standard plaque assay can be performed to assess viral titer as a measure of viral integrity. Alternatively, a marker gene expressed by the virus (e.g. a fluorescent protein) can be quantitated as an indication of virus infection and replication.

[0400] In another example, the virus that is assessed is one that is released from a hydrogel composition. For example, virus-containing hydrogel compositions can be incubated at or about 37° C. for varying periods of time by incubation of a gel disk in a physiologic buffer. The gels can be agitated, for example, in a shaking incubator. The release media can be removed and used to transfect or infect permissive cells or tumor cells. A standard plaque assay can be performed to assess viral titer as a measure of viral integrity. Alternatively, a marker gene expressed by the virus (e.g. a fluorescent protein) can be quantitated as an indication of virus infection and replication.

[0401] Viral integrity also can be assessed in vivo. For example, viral gene expression can be monitored over time following injection into a subject or animal model. In such examples, the VV-protein polymer composition, such as a VV-SELP composition (e.g. LIVP-SELP) is one that expresses a detectable gene product or a product capable of detection. After administration of the virus to a subject (e.g. a tumor bearing animal model, such as any generated as described below), the expression of a marker or other gene product can be monitored over time to assess if virus released from the composition is capable of infecting tumor cells. To specifically assess tumor-specific gene expression, tumors of animals can be imaged to detect the marker without sacrificing the subject or animals. In other examples, animals can be sacrificed over various time points, and the amount of marker present in tumor tissue can be determined.

[0402] 4. Anti-Tumorigenicity and Efficacy

[0403] Viruses in protein polymer compositions provided herein can be tested for parameters indicative of its anti-tumorigenic property. Generally, the parameters selected for are desirable for the treatment of proliferative diseases and disorders, including the treatment of a tumor or metastasis. For example, a virus can destroy tumor cells by replicating such that continual amplification of the virus results in infection of adjacent cells and their subsequent destruction. Oncolytic viruses also exhibit anti-tumorigenicity by expression of proteins that are cytotoxic to cancer cells. In further examples, viruses can exhibit anti-tumorigenicity by initiating specific and nonspecific anti-tumor immune responses, for example, the initiation of cytokine expression from infected cells (e.g. TNF) or through a specific response (e.g. CTL response). Hence, any of the above parameters can be assessed as indicative of anti-tumorigenicity of a virus.

[0404] For example, the isolated virus is tested in one or more in vitro and/or in vivo assays that assess infectivity, viral nucleic acid replication, virus production, viral gene expression from tumor cells, effects on the host cell, cytotoxicity of tumor cells, tumor cell selectivity, tumor cell type selectivity, specific and nonspecific immune response, and therapeutic efficacy. Parameters indicative of anti-tumorigenicity can be assessed in vitro or in vivo. In particular examples, anti-tumorigenicity is assessed in vivo. In vivo parameters of anti-tumorigenicity include, but are not limited to, a desirable therapeutic index in an animal model of cancer, release of tumor antigens and preferential accumulation of the virus in tumor tissues following administration. Exemplary of assays or methods to assess such parameters are described below.

[0405] a. Tumor-Associated Replication Indicator

[0406] Viruses in protein polymer compositions provided herein can be tested for replication and/or infectivity in tumor cells. The replication indicator that is measured is any parameter from which the level or amount or relative amount of viral replication, typically within a day of administration to the tumor cells, can be assessed or inferred. In some examples, replication can be assessed by measurement of a viral replication indicator, such as, for example, viral titer (i.e. as assessed by the number of plaques produced in a plaque assay) or the changes in viral gene expression or host gene expression (see, e.g. U.S. Patent Pub. No. 2009-0136917). For example, replication can be determined by infecting or introducing the test virus into a tumor cell and assessing a replication indicator at a particular time or as a function of time. This can be compared to a predetermined standard, for example the parental virus preparation or mixture or other reference strain (e.g. recombinant virus), or compared to other test strains or controls. Viruses can be tested to assess selective replication in tumor cells compared to normal cells.

[0407] Assays to assess replication can be performed on cell lysates of cells infected in vitro with any of the vaccinia virus in protein compositions provided herein (e.g. VV-SELP, such as LIVP-SELP compositions), for example, various tumor cell lines, primary tissues or cells as well as tumor cells such as from a biopsy. For example, a tissue or cell sample can be obtained (e.g., biopsy) from a subject (e.g., human or non-human animal subject), and the sample can be infected with one or more types of virus compositions. In other examples, tumor cell lines can be used. Tumor cell lines are known and available to one of skill in the art, for example, from the American Type Culture Collection (ATTC; Manassas, Va.) or from the European Collection of Cell Cultures (ECACC). Tumor cell lines also are available from the Division of Cancer Treatment and Diagnosis (DCTD) Tumor Repository (National Cancer Institute/National Institute of Health; dtp.nih.gov/index.html.) Exemplary of tumor cell lines include human and other animal cells lines and include, but are not limited to, DU145 human prostate carcinoma cells, LNCaP human prostate cancer cells, MCF-7 human breast cancer cells, MRC-5 human lung fibroblast cells, MDA-MB-438 human breast cancer cells, MDA-MB-231 human breast carcinoma cells, PC3 human prostate cancer cells, T47D human breast cancer cells, THP-1 human acute myeloid leukemia cells, U87 human glioblastoma cells, SH-SY5Y human neuroblastoma cells, Saos-2 human cells, A549 human lung carcinoma cells, A2780 human ovarian carcinoma cells, HCT 116 human colon cells, HT-29 human colon cells, SW260 human colon cells, HT-180 human fibrosarcoma, MIA PaCa-2 human pancreatic carcinoma cells, PANC-1 human pancreatic cells, CMT 64 C57BL/6 mouse cell, JC mouse mammary cells, TIB-75 mouse hepatic cells, CT26 WT mouse colon carcinoma cells, MC-38 mouse adenocarcinoma cells, B 16-F10 mouse melanoma cells, 4T1 murine mammary carcinoma cells and hamster pancreatic tumor HP-1 cells.

[0408] For example, cells or cell lines can be seeded onto wells of a plate. Virus compositions can then be added and allowed to infect the cells. At the end of the infection, the media can be changed to remove any residual virus and the cells further incubated. Then, the cells can be scraped into the media and collected. Cells can be lysed, for example, by freeze-thaw and/or sonication, to obtain virus-containing lysates. The extent of replication can be measured, such as by determination of viral titer or expression of genes as described further below. It is understood that the extent and degree of replication and/or infectivity efficiency of a virus will differ between various tumor cell types.

[0409] Assays to assess replication also can be performed on tumor-harvested virus propagated in vivo upon infection of tumor-bearing animals. Such an assay is a measure of the accumulation of the virus in tumor tissues. As discussed below, tumors can be established in animals by implantation of different tumor cell types. For example, tumor-bearing animals can be administered (e.g. topically or via intravenous administration or other route of administration) with a vaccinia virus in protein compositions provided herein (e.g. VV-SELP, such as LIVP-SELP compositions), virus propagated in tumors and virus or tumor extracted therefrom. The extent of replication can be measured, such as by determination of viral titer or expression of genes, as described further below.

[0410] In one example, cell culture supernatants or cell lysates from the infected cells or tumor cell extracts can be obtained following infection and subjected to assays to measure viral titer. For example, a standard plaque assay can be used. The plaque assay can indicate the biological activity in different cell types, including different tumor cell types. Titration of virus by plaque assay is known to one of skill in the art. In one example of a plaque assay, supernatants or cells lysates of tumors or cells infected with the virus is harvested and plaque assays can be performed. Typically, serial dilutions of the virus supernatant or lysate is made in the range of 10⁻² (1:100) to 10⁻¹⁰, and in particular from 10⁻⁵ to 10⁻¹⁰. Diluted virus is added to a monolayer of cells, for example, monolayers of permissive cell line, such as, for example, CV-1, Vero, BHK, RK13 or HEK-293 cell line, and incubated with virus. In some examples, the plaque assay can be performed directly on a cell monolayer of a tumor cells provided that the tumor cells can form a monolayer. Following incubation, an agarose overlay is added to the monolayer of cells without dislodging the cells, and the plate is further incubated until plaques become visible. A dye or color stain solution that is taken up by healthy cells but not dead cells, such as neutral red, is added to each of the wells or plate. After incubation, the dye or stain is removed such that the plaques are observed to be clear, while non-lysed cells remain stained. Titer (pfu/mL) is calculated by counting the number of plaques in the well and dividing by the dilution factor (d) and the volume (V) of diluted virus added to the well (# plaques/d×V). The virus yield can be converted to pfu/cell by dividing the total amount of virus present in the sample by the number of cells originally infected in the sample.

[0411] Other indicators of replication also can be assessed. For example, expression of viral genes, tumor proteins and/or housekeeping genes that are correlated with viral replication and/or infectivity in tumor cells can be assessed (see e.g. U.S. Patent Pub. No. 2009-0136917). For example, expression of housekeeping genes or other genes in tumor cells associated with virus replication and infectivity can be assessed (U.S. Patent Pub. No. 2009-0136917). For example, expression of a plurality of such genes, such as housekeeping genes, whose expression increases in tumor cells upon infection with virus are assessed. Exemplary of such genes that can be assessed include expression of one or more genes encoding a protein selected from among IL-18 (Interleukin-18), MCP-5 (Monocyte Chemoattractant Protein-5; CCL12), IL-11 (Interleukin-11), MCP-1 (Monocyte Chemoattractant Protein-1), MPO (Myeloperoxidase), Apo A1 (Apolipoprotein A1), TIMP-1 (Tissue Inhibitor of Metalloproteinase Type-1), CRP(C Reactive Protein), Fibrinogen, MMP-9 (Matrix Metalloproteinase-9), Eotaxin (CCL11), GCP-2 (Granulocyte Chemotactic Protein-2; CXCL6), IL-6 (Interleukin-6), Tissue Factor (TF), SAP (Serum Amyloid P), FGF-basic (Fibroblast Growth Factor-basic), MCP-3 (Monocyte Chemoattractant Protein-3; CCL7), IP-10 (CXCL 10), MIP-2, Thrombopoetin, Cancer antigen 125, CD40, CD40 ligand, ENA-78, Ferritin, IL-12p40, IL-12p70, IL-16, MMP-2, PAI-1, TNF RII, TNF-beta and VCAM-1. In another example, expression of a plurality of genes, such as housekeeping genes, whose expression decreases in tumor cells upon infection with virus are assessed. Exemplary of such genes include one or more genes encoding a protein selected from among MIP-1beta (Macrophage Inflammatory Protein-1beta), MDC (Macrophage-Derived Chemokine; CCL22), MIP-1alpha (Macrophage Inflammatory Protein-1alpha; CCL3), KC/GROalpha (Melanoma Growth Stimulatory Activity Protein), VEGF (Vascular Endothelial Cell Growth Factor), Endothelin-1, MIP-3 beta (Macrophage Inflammatory Protein-3 beta; Exodus-3 or ELC), Beta-2 microglobulin, IL-5 (Interleukin-5), IL-1 alpha (Interleukin-1 alpha), EGF (Epidermal Growth Factor), Lymphotactin (XCL1), GM-CSF (Granulocyte Macrophage-Colony Stimulating Factor), MIP-lgamma (Macrophage Inflammatory Protein-1 gamma; CCL4), IL-1beta (Interleukin-1 beta), BDNF (Brain-derived neutrophic factor), Cancer antigen 19-9, Carcinoembryonic antigen, C reactive protein, EGF, Fatty acid binding protein, Factor VII, Growth hormone, IL-1 alpha, IL-1 beta, IL-1 ra, IL-7, IL-8, MDC, Prostatic acid phosphatase, Prostate specific antigen, free, Stem cell factor, Tissue factor, TNF-alpha, VEGF and Von Willebrand factor.

[0412] Gene expression can be assayed after contacting a tumor sample with the virus for a period of time in vitro or in vivo and measuring the level of expression of one or more housekeeping genes or other genes. Any method known in the art can be used for assessing the expression of genes in a tumor can be employed. For example, methods for measuring protein expression levels which can be used include, but are not limited to, microarray analysis, ELISA assays, Western blotting, or any other technique for the quantitation of specific proteins. For RNA levels, examples of techniques which can be used include microarray analysis, quantitative PCR, Northern hybridization, or any other technique for the quantitation of specific nucleic acids. In some examples, a difference in expression of the same marker between the contacted and non-contacted biological samples of about less than 2-fold, about 2-fold, about 3-fold, about 4-fold, about 5-fold, about 6-fold, about 7-fold, about 8-fold, about 9-fold, about 10-fold, about 20-fold, about 30-fold, about 40-fold, about 50-fold, about 60-fold, about 70-fold, about 80-fold, about 90-fold, about 100-fold or greater than about 100-fold is indicative of specific replication and/or infectivity of a tumor cell.

[0413] For in vitro tests, varying doses/multiplicity of infection (MOI; ratio of virus to cell) of the virus can be assessed in order to assess the rate of viral infection and virus production at different infection levels. Viruses that exhibit a high rate of replication at a lower MOI are generally desirable for therapy of a proliferative disorder or disease. For example, cells can be infected at an MOI of at or between 0.1 to 10, such as 0.5 to 5, for example, 0.5 to 2, for example, an MOI of at or at least 0.25, 0.5, 1, 1.5, 2 or more.

[0414] In any of the examples herein of assessing replication or infectivity of a virus, tumor cell selectivity of the virus also can be assessed. For example, normal cells and tumor cells can be infected with the vaccinia virus in protein composition (e.g. VV-SELP, such as LIVP-SELP compositions) followed by assessment of replication and or infectivity using any of the assays described herein or known to one of skill in the art. For example, measurement of viral titer by plaque assay or by expression of genes as described can be determined in virally-infected tumor cells versus virally-infected normal cells. Normal or non-transformed cells include, but are not limited to, MRC-5 lung fibroblast cells, Beas-2B bronchial epithelial cells, normal human bronchial epithelial (NHBE), small airway bronchial epitherlial (SAEC). Tumor cells include any described herein or known to one of skill in the art and include, but are not limited to, A2780, A549, HCT 116, HT 1080, LNCaP or SW620 cells. In some examples, paired tumor and non-tumor cell lines can be infected with virus and compared. Exemplary corresponding or paired tumor and non-tumor cell lines are known to one of skill in the art (see e.g., Gazdar et al. (1998) Int. J. Cancer, 78:766-774, Theodore et al. (2010) Int. J. Oncology, 37:1477-1482; Niedbala et al. (2001) Radiation Research, 155:297-303). In other examples, tumors infected in vivo can be harvested and can be compared to normal cells or tissues that also are extracted from the same infected animal. Infection and replication of virus in normal cells and tumor cells can be assessed and compared. The therapeutic index of the virus can be determined by the ratio of replication in the tumor cell compared to the normal cell (e.g. virus produced per cell; pfu/cell).

[0415] b. Cytotoxicity

[0416] Viruses in protein polymer compositions provided herein (e.g. VV-SELP, for example LIVP-SELP) can be tested to determine if they are cytotoxic or kill tumor cells. For example, viruses can eliminate tumor cells via induction of cell death and/or lysis of the tumor cell (i.e. oncolysis). The cell killing activity of the virus can be assessed by a variety of techniques known in the art including, but not limited to, cytotoxicity/cell viability assays that can be employed to measure cell necrosis and/or apoptosis following virus infection, such as MTT (3-(4,5-dimethylthiazol-2-yl)-2,5-diphenyltetrazolium bromide) assays and other related tetrazolium salt based assays (e.g. XTT, MTS or WST), ATP assays, apoptosis assays, such as TUNEL staining of infected cells, DNA fragmentation assays, DNA laddering assays, and cytochrome C release assays. Such assays are well known to one of skill in the art.

[0417] For example, viability of virally-infected cells can be assessed. Various tumor cell lines, for example any described above or known to one of skill in the art, can be seeded in a 96-well plate (e.g. at or about 5,000 cells/well) or other size well-plate and grown overnight, and then can be infected with serial dilution of virus or the VV-protein polymer compositions provided herein (e.g. VV-SELP, for example LIVP-SELP). For example, various MOI of the virus can be tested. MOI can range from, for example, 1000 to 0.0001, such as 100 to 0.001 or 10 to 0.01. It is within the level of one of skill in the art to empirically select or determine an appropriate MOI range in which to use. Once infected, the cells can be incubated for a period of time before assessment of cytotoxicity. For example, samples for assessment of cytotoxicity are typically obtained at selected time points following virus infection of the cells, such as, for example, 1 hour, 2 hours, 4 hours, 8 hours, 16 hours, 24 hours, 1.5 days. 2 days, 2.5 days, 3 days, 4 days, 5 days, 6 days or more. One of skill in the art can select appropriate time points for assessment of viral replication based on the relative infectivity of the virus compared to other known virus strains. Generally, infection is allowed to proceed at least 12 hours, 24 hours, 36 hours, 48 hours, 72 hours, 84 hours, 96 hours or more.

[0418] Following infection for the designated period, media is replaced and viability of the cells is determined based on any assay or procedure known to one of skill in the art. Exemplary of assays to assess viability are colorimetric assays that permit visualization of cells based on metabolic activity and measure the reducing potential of the tetrazolium salt to a colored formazan product (e.g. MTT assay, MTS assay or XTT assay). Other redox assays include assays that measure the ability of cells to convert a redox dye resazurin to a fluorescent end product resorufin (McMillian et al. (2002) Cell Biol. Toxicology, 18:157-173; CellTiter-Blue™ Cell Viability Assay, Promega). In other examples, viability can be assessed using a CASY cell counting technology, which is an electric field multi-channel cell counting system based on existence of a transmitted electric field through injured or dead cells as compared to normal cells (e.g. CASY® Model TT; Roche Innovatis AG). Additional examples include, but are not limited to, trypan blue or propidium iodide dye exclusion assay, measurement of lactate dehydrogenase (LDH; see e.g., LDH Cytotoxicity Detection Kit, Clontech, Cat. #630117), sulforhodamine B (SRB) assay (e.g. CytoScan™ SRB Cytotoxicity Assay, GBiosciences, Cat. No. 786-213, WST assay (e.g. Cytoscan™ WST-1 Cell Proliferation Assay, GBiosciences, Cat No. 786-212), clonogenic assay and luciferase-based ATP-based assays (e.g., CelTiter-Glo™ Luminexcent Cell Viability Assay; Promega).

[0419] Generally, the assays are performed using various controls. For example, any assay to assess viability generally is performed with untreated wells containing cells only (e.g. 100% viable) as well as cell-free wells (0% viable). Also, in addition to the testing vaccinia virus in protein polymer compositions, other control viruses can be tested. For example, a reference virus strain, for example, a known attenuated recombinant strain can be tested that is a non-matrix virus composition. Exemplary of such as strain is GLV-1h68 or a derivative thereof containing inserted heterologous genes. In examples where virus is added as a control, the MOI range of virus that is used is the same as the tested VV-protein polymer composition.

[0420] A virus exhibits a cytopathic effect if it is determined to exhibit a reduction in cell viability relative to an untreated well containing cells only (100% viable). In other examples, a virus exhibits a cytopathic effect if it is determined to exhibit a reduction in cell viability relative to the viability of cells in a well treated with a control or reference virus that is not oncolytic. In a further example, a virus exhibits a cytopathic effect if it is determined to exhibit a similar or greater effect on cell viability relative to the viability of cells in a well treated with a known reference attenuated virus strain, such as an attenuated recombinant virus (e.g. GLV-1h68 or derivative thereof).

[0421] c. Tumor Growth

[0422] Viruses in protein polymer compositions provided herein (e.g. VV-SELP, for example LIVP-SELP) can be tested to determine if it causes shrinkage of tumor size and/or delays tumor progression. Tumor size can be assessed in vivo in tumor-bearing human or animal models treated with virus. Tumor shrinkage or tumor size can be assessed by various assays known in art, such as, by weight, volume or physical measurement.

[0423] Tumor-bearing animal models can be generated. In vivo tumors can be generated by any known method, including xenograft tumors generated by inoculating or implanting tumor cells (e.g. by subcutaneous injection) into an immunodeficient rodent, syngeneic tumors models generated by inoculating (e.g. by subcutaneous injection) a mouse or rat tumor cell line into the corresponding immunocompetent mouse or rat strain, metastatic tumors generated by metastasis of a primary tumor implanted in the animal model, allograft tumors generated by the implantation of tumor cells into the same species as the origin of the tumor cells, and spontaneous tumors generated by genetic manipulation of the animal. The tumor models can be generated orthotopically by injection of the tumor cells into the tissue or organ of their origin, for example, implantation of breast tumor cells into a mouse mammary fat pad. Any of the above models provide a consistent and reproducible tool for evaluating tumor cell growth, as well as permitting easy access to assess the mass of the tumor.

[0424] In particular examples, xenograft models or syngenic models are used. For example, tumors can be established by subcutaneous injection at the right armpit with a cell suspension (e.g. 1×10⁶ to 5×10⁶ cells/animal) of different tumor cell types into immunocompetent hosts (syngeneic) or immunodeficient hosts (e.g. nude or SCID mice; xenograft). Exemplary human tumor xenograft models in mice, such as nude or SCID mice, include, but are not limited to, human lung carcinoma (A549 cells, ATCC No. CCL-185); human breast tumor (G1-101A cells, Rathinavelu et al., Cancer Biochem. Biophys., 17:133-146 (1999)); human ovarian carcinoma (OVCAR-3 cells, ATCC No. HTB-161); human pancreatic carcinoma (PANC-lcells, ATCC No. CRL-1469 and MIA PaCa-2 cells, ATCC No. CRL-1420); DU145 cells (human prostate cancer cells, ATCC No. HTB-81); human prostate cancer (PC-3 cells, ATCC# CRL-1435); colon carcinoma (HT-29 cells); human melanoma (888-MEL cells, 1858-MEL cells or 1936-MEL cells; see e.g. Wang et al., (2006) J. Invest. Dermatol. 126:1372-1377); and human fibrosarcoma (HT-1080 cells, ATCC No. CCL-121,) and human mesothelioma (MSTO-211H cells). Exemplary rat tumor xenograft models in mice include, but are not limited to, glioma tumor (C6 cells; ATCC No. CCL-107). Exemplary mouse tumor homograft models include, but are not limited to, mouse melanoma (B 16-F10 cells; ATCC No. CRL-6475). Exemplary cat tumor xenograft models in mice include, but are not limited to, feline fibrosarcoma (FC77.T cells; ATCC No. CRL-6105). Exemplary dog tumor xenograft models in mice include, but are not limited to, canine osteosarcoma (D 17 cells; ATCC No. CCL-183). Non-limiting examples of human xenograft models and syngeneic tumor models are set forth in the Tables 7 and 8 below.

TABLE 7
Human Tumor Xenograft Models

| | Cell Line | | |
|---|---|---|---|
| Tumor Type | Name | Tumor Type | Cell Line |
| Adenoid cystic | ACC-2 | Leukemia | HL-60 |
| carcinoma | | | |
| Bladder carcinoma | EJ | Liver carcinoma | Bel-7402 |
| Bladder carcinoma | T24 | Liver carcinoma | HepG-2 |
| Breast carcinoma | BCaP-37 | Liver carcinoma | QGY-7701 |
| Breast carcinoma | MX-1 | Liver carcinoma | SMMC7721 |
| Cervical carcinoma | SiHa | Lung carcinoma | A549 |
| Cervical carcinoma | Hela | Lung carcinoma | NCI-H460 |
| Colon carcinoma | Ls-174-T | Melanoma | A375 |
| Colon carcinoma | CL187 | Melanoma | M14 |
| Colon carcinoma | HCT-116 | Melanoma | MV3 |
| Colon carcinoma | SW116 | Ovary carcinoma | A2780 |
| Gastric carcinoma | MGC-803 | Pancreatic carcinoma | BXPC-3 |
| Gastric carcinoma | SGC-7901 | Prostate carcinoma | PC-3M |
| Gastric carcinoma | BGC-823 | Tongue carcinoma | Tca-8113 |
| Kidney carcinoma | Ketr-3 | | |

TABLE 8
Syngeneic Mouse Tumor Model

| Tumor Type | Cell Line Name | Strain of Mice |
|---|---|---|
| Cervical carcinoma | U14 | ICR |
| Liver carcinoma | H22 | ICR |
| Lung carcinoma | Lewis | C57BL6 |
| Melanoma | B16F1, B16F10, B16BL6 | C57BL6 |
| Sarcoma | S180 | ICR |

[0425] Tumor size and volume can be monitored based on techniques known to one of skill in the art. For example, tumor size and volume can be monitored by radiography, ultrasound imaging, necropsy, by use of calipers, by microCT or by ¹⁸F-FDG-PET. Tumor size also can be assessed visually. In particular examples, tumor size (diameter) is measured directly using calipers. In other examples, tumor volume can be measured using an average of measurements of tumor diameter (D) obtained by caliper or ultrasound assessments. The volume can be determined from the formula V=D³×π/6 (for diameter measured using calipers) or V=D²×d×π/6 (for diameter measured using ultrasound where d is the depth or thickness). For example, caliper measurements can be made of the tumor length (1) and width (w) and tumor volume calculated as length×width²×0.52. In another example, microCT scans can be used to measure tumor volume (see e.g. Huang et al. (2009) PNAS, 106:3426-3430). In such an example, mice can be injected with Optiray Pharmacy loversol injection 74% contrast medium (e.g. 741 mg of loversol/mL), mice anesthetized, and CT scanning done using a MicroCat 1A scanner or other similar scanner (e.g. IMTek) (40 kV, 600 μA, 196 rotation steps, total angle or rotation=196). The images can be reconstructed using software (e.g. RVA3 software program; ImTek). Tumor volumes can be determined by using available software (e.g. Amira 3.1 software; Mercury Computer Systems).

[0426] Once the implanted tumors reach a predetermined size or volume, the models can be used for treatment with virus. The exact final tumor volume can be empirically determined and is a function of the particular type of tumor as well as the end-point of the analysis. Generally, mice are sacrificed if the tumor volume is greater than 3 cm³.

[0427] Tumor-bearing animals are infected with virus. The route of administration for infection can be any desired route of administration, for example, intravenous or topical. Other routes also can be employed, for example, intraperitoneal, such as subcutaneous, or can be intratumoral. The vaccinia virus in protein polymer compositions provided herein (e.g. VV-SELP, for example LIVP-SELP) can be administered at varying dosages. For example, the virus can be administered to tumor-bearing animals at or between about 1×10⁴ to 1×10⁸ pfu, such as 1×10⁵ to 1×10⁷ pfu, for example at least or about or 1×10⁶, 2×10⁶, 3×10⁶, 4×10⁶ or 5×10⁶ pfu. Progressing tumors are visualized and tumor size and tumor volume can be measured using any technique known to one of skill in the art. For example, tumor volume or tumor size can be measured using any of the techniques described herein. Tumor volume and size can be assessed or measured at periodic intervals over a period of time following virus infections, such as, for example, every hour, every 6 hours, every 12 hours, every 24 hours, every 36 hours, every 2 days, every 3 days, every 4 days, every 5 days, every 6 days, every 7-days, every week, every 3 weeks, every month or more post-infection. A graph of the median change in tumor volume over time can be made and the total area under the curve (AUC) can be calculated. A therapeutic index also can be calculated using the formula AUC_{untreated animals}−AUC_{virus-treated animals}/AUC_{untreated}×100.

[0428] In additional examples, tumors can be harvested from the animals and weighed. In further examples, the harvested tumors can be lysed. For example, lysis of tumors can be by freeze thaw of the harvested tumor several times (e.g. at least 2 times, 3 times or 4 times) shortly after removal of the tumor from the animal. For example, the tumor is lysed by 3 freeze thaw cycles within 2 hours of removal. The virus in the tumor lysates can be titered as described above and the amount of virus in each tumor sample determined. In some examples, the virus titer can be expressed as tissue culture infectious dose normalized to the tissue weight (TCID₅₀/mg tissue). In particular examples, the effect of the virus on other organs or tissues in the animal can be assessed. For example, other organs can be harvested from the animals, weighed and/or lysed for viral titer determination.

[0429] Generally, tumor-bearing animals generated in the same manner, at the same time and with the same type of tumor cells are used as controls. Such control tumor-bearing animals include those that remain untreated (not infected with virus). Additional controls animals can include those infected with a reference virus strain, such as a non-matrix virus composition or solution. Exemplary of such a strain is GLV-1h68 or a derivative thereof containing inserted heterologous genes. Comparison of tumor size or volume can be made at any predetermined time post-infection, and can be empirically determined by one of skill in the art. In some examples, a comparison can be made at the day in which the untreated control is sacrificed. In other examples, analysis of the total AUC can be made, and AUC values compared as an indicator of the size and volume of the tumor over the time period of infection. A decrease in tumor size, volume or weight compared to control treated or untreated tumor-bearing animals means that the virus itself is mediating tumor regression or shrinkage or that the virus is mediating delayed tumor progression compared to control treated or untreated tumor-bearing animals. Tumor shrinkage or delay in tumor progression are parameters indicative of anti-tumorigenicity.

[0430] 5. Toxicity/Safety

[0431] Virus in protein polymer compositions provided herein can be tested for parameters indicative of its toxicity/safety property. Viruses can be toxic to their hosts by manufacturing one or more compounds that worsen the health condition of the host. In addition, the biocompatibility of the protein polymer also can be assessed by evaluating toxicity. Toxicity to the host can be manifested in any of a variety of manners, including septic shock, neurological effects, or muscular effects. Typically, vaccinia virus exhibits minimal to no toxicity to a host, such that the host does not die or become severely ill from the toxic effects of the virus. For example, the viruses are not toxic or exhibit minimal toxicity if a host typically has no significant long-term effect from the presence of the viruses in the host, beyond any effect on tumorous, metastatic or necrotic organs or tissues. For example, minimal toxicity can be a minor fever or minor infection, which lasts for less than about a month, and following the fever or infection, the host experiences no adverse effects resultant from the fever or infection. In another example, the minimal toxicity can be measured as an unintentional decline in body weight of about 5% or less for the host after administration of the virus. In other examples, the virus has no toxicity to the host.

[0432] Parameters indicative of toxicity or safety of a virus can be tested in vitro or in vivo. Typically, assessment is in vivo. Exemplary methods include administration of the virus to a subject (e.g. animal model) and assessment of one or more properties associated with toxicity including, but not limited to, survival of the subject, decrease in body weight, existence of side effects such as fever, rash or other allergy, fatigue or abdominal pain, induction of an immune response in the subject, tissue distribution of the virus, amount of tumor antigens that are released and decreased rate of pock formation. Hence, any of the above parameters can be assessed as indicative of toxicity/safety of a virus.

[0433] As above, subjects (e.g. animals such as tumor-bearing animal models) are infected with virus. The route of administration for infection can be any desired route of administration, for example, intravenous or topical. Other routes also can be employed, for example, intraperitoneal, such as subcutaneous, or can be intratumoral. The virus can be administered at varying dosages. For example, the virus can be administered to tumor-bearing animals at or between about 1×10⁴ to 1×10⁸ pfu, such as 1×10⁵ to 1×10⁷ pfu, for example at least or about or 1×10⁶, 2×10⁶, 3×10⁶, 4×10⁶ or 5×10⁶ pfu. For humans, the virus can be administered at or between about 1×10⁷ to 1×10¹⁴ pfu, such as 1×10⁷ to 1×10¹⁰ pfu or 1×10⁹ to 1×10¹⁰ pfu, for example at least or about 1×10⁹, 2×10⁹, 3×10⁹, 4×10⁹, or 5×10⁹ pfu. Parameters indicative of toxicity such as the survival and weight of the subject can be monitored over time. For example, survival and weight can be monitored at periodic intervals over a period of time following virus infections, such as, for example, every hour, every 6 hours, every 12 hours, every 24 hours, every 36 hours, every 2 days, every 3 days, every 4 days, every 5 days, every 6 days, every 7-days, every week, every 3 weeks, every month or more post-infection.

[0434] Generally, control subjects (e.g. animal models such as tumor-bearing animal models) are similarly monitored. Such control subjects include those that remain untreated (not infected with virus). Additional controls animals can include those infected with a reference virus strain, such as a non-matrix virus composition or solution. Exemplary of such a strain is GLV-1h68 or a derivative thereof containing inserted heterologous genes.

### H. THERAPEUTIC, DIAGNOSTIC AND MONITORING METHODS

[0435] Vaccinia virus (e.g. LIVP) in protein polymer (e.g. SELP) compositions (e.g. VV-SELP or LIVP-SELP) provided herein can be used in diagnostic, monitoring and therapeutic methods. The compositions provided herein are particularly suitable for treatment of hyperproliferative diseases or conditions, such as in the treatment of tumors or cancers. The compositions are suitable for such treatments and therapies because they 1) form a hydrogel matrix that is safe and biodegradable; 2) protect viral integrity within the gel at body temperature; 3) allow for sustained viral release in vivo; and 4) facilitate effective viral infection of adjacent tumor cells.

[0436] For example, in therapeutic methods the VV-protein polymer, such as VV-SELP and in particular an LIVP-SELP composition provided herein, can be used for the treatment of proliferative disorders or conditions, including the treatment of cancerous cells, neoplasms, tumors, metastases and other immunoprivileged cells or tissues, such as wounds or wounded or inflamed tissues. The VV-protein polymer, such as VV-SELP and in particular LIVP-SELP, compositions provided herein can be used in diagnostic methods for detecting and imaging of cancerous cells, tumors and metastases monitoring treatment. The diagnostic and therapeutic methods provided herein include, but are not limited to, delivering a composition provided herein to a subject containing a tumor and/or metastases or wound. In one example, in examples of treatments or methods provided herein, delivery of the composition can be effected by systemic administration, for example intravenous administration of the composition to the subject. In another example of treatment or methods provided herein, delivery of the composition can be effected by topical application of the composition to a surface of the subject.

[0437] The compositions provided herein, and in particular the LIVP in protein polymer compositions (e.g. LIVP-SELP) provided herein, can be used or modified for use in any known methods (or uses) in which LIVP viruses have been employed or can be employed (see e.g. see e.g. U.S. Pub. Nos. US2003-0059400, US2003-0228261, US2009-0117034, US2009-0098529, US2009-0053244, US2009-0081639 and US2009-0136917; U.S. Pat. Nos. 7,588,767 and 7,763,420; and International Pub. No. WO 2009/139921). Any LIVP virus, including the GLV-1h68 virus and derivatives thereof, can be used for the compositions herein for use in therapeutic and diagnostic methods described below and discussed throughout the disclosure herein.

[0438] The subject can be any subject, such as a animal subject, including mammal or avian species. For example, the animal subject can be a human or non-human animal including, but not limited to, a goat, sheep, horse, cat, or dog. In particular examples, the animal subject is a human subject.

[0439] The combinations provided herein also can be used in combination with other treatments. For example, treatment also can be accomplished by perfusion, direct injection or local application of the area with an additional anti-cancer therapy. Such treatment may be repeated, for example, every 1, 2, 3, 4, 5, 6, or 7 days, or every 1, 2, 3, 4, and 5 weeks or every 1, 2, 3, 4, 5, 6, 7, 8, 9, 10, 11, or 12 months. These treatments may be of varying dosages as well.

[0440] 1. Therapeutic Methods

[0441] The compositions provided herein can be used for the treatment of disease or conditions associated with immunoprivileged cells or tissues, including proliferative disorders or conditions, including the treatment (such as inhibition) of cancerous cells, neoplasms, tumors, metastases, cancer stem cells, and other immunoprivileged cells or tissues, such as wounds and wounded or inflamed tissues.

[0442] In particular, provided herein are methods of treating cancerous cells, neoplasms, tumors, metastases and cancer stem cells. The viruses in the compositions provided herein preferentially accumulate in tumors or metastases. In some examples, the administration of a virus provided herein results in a slowing of tumor growth, and in some cases an inhibition in tumor growth. In other examples, the administration of a virus provided herein results in a decrease in tumor volume, including elimination or eradication of the tumor.

[0443] Methods of reducing or inhibiting tumor growth, inhibiting metastasis growth and/or formation, decreasing the size of a tumor or metastasis, eliminating a tumor or metastasis and/or cancer stem cell or other tumor therapeutic methods provided herein include causing or enhancing an anti-tumor immune response in the host. The immune response of the host, being anti-tumor in nature, can be mounted against tumors and/or metastases in which viruses have accumulated, and can also be mounted against tumors and/or metastases in which viruses have not accumulated, including tumors and/or metastases that form after administration of the virus to the subject. Hence, the virus compositions provided herein can be used in methods to inhibit or prevent recurrence of a neoplastic disease or new tumor growth, where the methods include administering to a subject a composition provided herein, whereby a virus that can accumulate in a tumor and/or metastasis, and can cause or enhance an anti-tumor immune response, and the anti-tumor immune response can inhibit or prevent recurrence of a neoplastic disease or inhibit or prevent new tumor growth.

[0444] For example, viruses in the compositions provided herein, when administered or delivered to a subject, can be used to stimulate humoral and/or cellular immune response, induce strong cytotoxic T lymphocytes responses in subjects who can benefit from such responses. For example, the virus can provide prophylactic and therapeutic effects against a tumor infected by the virus or other infectious diseases, by rejection of cells from tumors or lesions using viruses that express immunoreactive antigens (Earl et al., Science 234: 728-831 (1986); Lathe et al., Nature (London) 32: 878-880 (1987)), cellular tumor-associated antigens (Bernards et al., Proc. Natl. Acad. Sci. USA 84: 6854-6858 (1987); Estin et al., Proc. Natl. Acad. Sci. USA 85: 1052-1056 (1988); Kantor et al., J. Natl. Cancer Inst. 84: 1084-1091 (1992); Roth et al., Proc. Natl. Acad. Sci. USA 93: 4781-4786 (1996)) and/or cytokines (e.g., IL-2, IL-12), costimulatory molecules (B7-1, B7-2) (Rao et al., J. Immunol. 156: 3357-3365 (1996); Chamberlain et al., Cancer Res. 56: 2832-2836 (1996); Oertli et al., J. Gen. Virol. 77: 3121-3125 (1996); Qin and Chatterjee, Human Gene Ther. 7: 1853-1860 (1996); McAneny et al., Ann. Surg. Oncol. 3: 495-500 (1996)), or other therapeutic proteins.

[0445] Methods of administering a composition containing a virus also can cause tumor cell lysis or tumor cell death. For example viruses, such as the viruses in compositions provided herein, can cause cell lysis or tumor cell death as a result of expression of an endogenous gene or as a result of an exogenous gene. Endogenous or exogenous genes can cause tumor cell lysis or inhibit cell growth as a result of direct or indirect actions, as is known in the art, including lytic channel formation or activation of an apoptotic pathway. Gene products, such as exogenous gene products can function to activate a prodrug to an active, cytotoxic form, resulting in cell death where such genes are expressed.

[0446] As shown previously, solid tumors can be treated with viruses, such as vaccinia viruses, resulting in an enormous tumor-specific virus replication, which can lead to tumor protein antigen and viral protein production in the tumors (U.S. Patent Publication No. 2005-0031643, now U.S. Pat. Nos. 7,588,767, 7,588,771, 7,662,398), which provide and exemplify the GLV-1h68 virus and derivatives thereof. Vaccinia virus administration to mice resulted in lysis of the infected tumor cells and a resultant release of tumor-cell-specific antigens. Continuous leakage of these antigens into the body led to a very high level of antibody titer (in approximately 7-14 days) against tumor proteins, viral proteins, and the virus encoded engineered proteins in the mice. The newly synthesized anti-tumor antibodies and the enhanced macrophage, neutrophils count were continuously delivered via the vasculature to the tumor and thereby provided for the recruitment of an activated immune system against the tumor. The activated immune system then eliminated the foreign compounds of the tumor including the viral particles. This interconnected release of foreign antigens boosted antibody production and continuous response of the antibodies against the tumor proteins to function like an autoimmunizing vaccination system initiated by vaccinia viral infection and replication, followed by cell lysis, protein leakage and enhanced antibody production.

[0447] In one example, the tumor treated is a cancer such as pancreatic cancer, non-small cell lung cancer, multiple myeloma or leukemia, although the cancer is not limited in this respect, and other metastatic diseases can be treated by the combinations provided herein. For example, the tumor treated can be a solid tumor, such as of the lung and bronchus, breast, colon and rectum, kidney, stomach, esophagus, liver and intrahepatic bile duct, urinary bladder, brain and other nervous system, head and neck, oral cavity and pharynx, cervix, uterine corpus, thyroid, ovary, testes, prostate, malignant melanoma, cholangiocarcinoma, thymoma, non-melanoma skin cancers, as well as hematologic tumors and/or malignancies, such as childhood leukemia and lymphomas, multiple myeloma, Hodgkin's disease, lymphomas of lymphocytic and cutaneous origin, acute and chronic leukemia such as acute lymphoblastic, acute myelocytic or chronic myelocytic leukemia, plasma cell neoplasm, lymphoid neoplasm and cancers associated with AIDS. Exemplary tumors include, for example, pancreatic tumors, ovarian tumors, lung tumors, colon tumors, prostate tumors, cervical tumors and breast tumors. In one example, the tumor is a carcinoma such as, for example, an ovarian tumor or a pancreatic tumor.

[0448] Any mode of administration of a virus to a subject can be used, provided the mode of administration permits the virus to enter a tumor or metastasis. Modes of administration can include, but are not limited to, systemic, parenteral, intravenous, intraperitoneal, subcutaneous, intramuscular, transdermal, intradermal, intra-arterial (e.g., hepatic artery infusion), intravesicular perfusion, intrapleural, intraarticular, topical, intratumoral, intralesional, endoscopic, multipuncture (e.g., as used with smallpox vaccines), inhalation, percutaneous, subcutaneous, intranasal, intratracheal, oral, intracavity (e.g., administering to the bladder via a catheter, administering to the gut by suppository or enema), vaginal, rectal, intracranial, intraprostatic, intravitreal, aural, ocular or topical administration. In some examples, a diagnostic or therapeutic agent as described elsewhere herein also can be similarly administered.

[0449] One skilled in the art can select any mode of administration compatible with the subject and the virus, and that also is likely to result in the virus reaching tumors and/or metastases. The route of administration can be selected by one skilled in the art according to any of a variety of factors, including the nature of the disease, the kind of tumor, and the particular virus contained in the pharmaceutical composition. Exemplary of modes of administration of the vaccinia virus in protein polymer compositions provided herein are systemic administration (e.g. intravenous administration) or topical administration directly to the surface of a wound or lesion or other surface of a subject. For example, administration to the target site can be performed, for example, by systemic administration by injection into an artery or by topical administration by direct application onto a surface or by surface application of a coated device (e.g. bandage).

[0450] a. Systemic Delivery to Treat or Detect Proliferative or Inflammatory Cells or Tissues (e.g. Tumors)

[0451] Provided herein are methods of systemically administering a vaccinia virus in protein polymer composition (e.g. VV-SELP or LIVP-SELP), such as any provided herein, to treat a proliferative or inflammatory disease or condition. In particular, the condition is associated with immunoprivileged cells or tissues. A disease or condition associated with immunoprivileged cells or tissues includes, for example, proliferative disorders or conditions, including the treatment (such as inhibition) of cancerous cells, neoplasms, tumors, metastases, cancer stem cells, and other immunoprivileged cells or tissues, such as wounds and wounded or inflamed tissues. In particular examples of such methods, compositions provided herein are administered by intravenous administration.

[0452] Vaccinia virus, in particular Lister strain, such as LIVP viruses, can be administered systemically, for example by intravenous administration, because it exhibits little to no host toxicity. Although administration of a bolus of virus directly into the bloodstream can result in rapid dissemination of the virus throughout the organism, the virus compositions herein are efficiently delivered and infect immunoprivileged cells and tissues, for example, tumors. Systemic administration, such as intravenous administration, of the virus compositions is possible because the virus is able to accumulate in immunoprivileged cells and tissues (e.g. tumors), yet is efficiently cleared from the subject and does not significantly accumulate in non-tumor tissues. This can result in decreased toxicity.

[0453] In addition; when delivered systemically (e.g. intravenously), the vaccinia virus in protein polymer (e.g. SELP) compositions provided herein also can demonstrate an increased infectivity of tumors than non-polymer containing virus compositions. This increased infectivity or delivery of virus to tumors can be the result of an increased accumulation of the polymer composition to tumors than virus alone based on the high molecular weight of the hydrogels. For example, the vasculature of tumors is generally more leaky than healthy tissues or associated vasculature, which permits access of the hydrogel compositions to diseased sites. In addition, increased infectivity of tumors also can be associated with an increased viral integrity of the virus in vivo, and the concomitant increase in tumor exposure and amount of virus that is available for accumulation into the tumor.

[0454] By intravenous administration, the VV-polymer compositions provided herein, for example VV-SELP compositions such as LIVP-SELP compositions, can be used to treat any neoplastic disease, such as carcinoma, sarcoma, lymphoma or leukemia. In particular, intravenous administration of compositions provided herein can effect treatment of solid tumors (e.g. sarcomas, arcinomas or epithelial tumors or lymphomas) and cancers other than solid tumors, such as leukemia and metastastic disease. For example, exemplary of such tumors, cancers or neoplastic diseases include, for example, carcinoma of the tongue, mouth, throat, stomach, cecum, colon, rectum, breast, ovary, uterus, thyroid, adrenal cortex, lung, kidney, prostate, pancreas, a melanoma, a basal cell carcinoma of the skin, a leukemia, a lymphoma, or an osteosarcoma.

[0455] In particular, examples of solid tumors include, but are not limited to, sarcomas and carcinomas such as, but not limited to: fibrosarcoma, myxosarcoma, liposarcoma, chondrosarcoma, osteogenic sarcoma, chordoma, angiosarcoma, endotheliosarcoma, lymphangiosarcoma, lymphangioendotheliosarcoma, synovioma, mesothelioma, Ewing's tumor, leiomyosarcoma, rhabdomyosarcoma, colon carcinoma, pancreatic cancer, breast cancer, ovarian cancer, prostate cancer, squamous cellcarcinoma, basal cell carcinoma, adenocarcinoma, sweat gland carcinoma, sebaceous gland carcinoma, papillary carcinoma, papillary adenocarcinomas, cystadenocarcinoma, medullary carcinoma, bronchogenic carcinoma, renal cell carcinoma, hepatoma, bile duct carcinoma, choriocarcinoma, seminoma, embryonal carcinoma, Wilms tumor, cervical cancer, testicular tumor, lung carcinoma, small cell lung carcinoma, bladder carcinoma, epithelial carcinoma, glioma, astrocytoma, medulloblastoma, craniopharyngioma, ependymoma, pinealoma, hemangioblastoma, acoustic neuroma, oligodendroglioma, meningioma, melanoma, neuroblastoma, and retinoblastoma.

[0456] Cancers for treatment by systemic administration (e.g. intravenous administration) of a composition herein also includes cancers that metastasize. It is understood by those in the art that metastasis is the spread of cells from a primary tumor to a noncontiguous site, usually via the bloodstream or lymphatics, which results in the establishment of a secondary tumor growth. Examples of cancers contemplated for treatment include, but are not limited to melanoma, bladder, non-small cell lung, small cell lung, lung, hepatocarcinoma, retinoblastoma, astrocytoma, glioblastoma, neuroblastoma, head, neck, breast, pancreatic, gum, tongue, prostate, renal, bone, testicular, ovarian, mesothelioma, cervical, gastrointestinal lymphoma, brain, or colon cancer and any other tumors or neoplasms that are metastasized or at risk of metastasis.

[0457] The compositions provided herein can be administered by a single injection, by multiple injections, or continuously. For example, the compositions can be administered by slow infusion including using an intravenous pump, syringe pump, intravenous drip or slow injection. If administered continuously, the compositions are generally administered while in liquid form prior to hydrogel formation. For example, continuous administration of the compositions can occur over the course of minutes to hours, such as between or about between 1 minutes to 1 hours, such as between 20 and 60 minutes.

[0458] b. Delivery to Treat or Detect Wounds or Hyperproliferative Surface Lesions

[0459] Provided herein are methods using a VV-polymer compositions, for example VV-SELP or LIVP-SELP compositions such as any provided herein, for the treatment of a surface wound or hyperproliferative surface lesion. The compositions provided herein also can be used for detection or a surface wound or hyperproliferative surface lesion. The compositions provided herein are particularly suitable for such topical applications because they are able to be applied as gels or rapidly form a highly viscous gel that can adhere to a body surface (e.g. a tumor) for prolonged viral contact with the surface (e.g. tumor). In particular, the topical application or delivery of virus in protein polymers (e.g. SELP) is advantageous over topical delivery of non-matrix viral solutions, because non-matrix viral solutions are hindered by inadequate or only brief contact with the wound or lesion surface, runoff of the viral solution away from the wound or lesion surface, and rapid viral degradation at body temperature. Delivery of virus in a matrix as provided in the VV-protein polymer (e.g. VV-SELP, such as LIVP-SELP) compositions herein permits the composition to adhere to the wound or lesion surface to permit prolonged viral-contact, protects viral integrity within the gel at body temperature, allows for sustained viral release in vivo and facilitates effective viral infection of cells. In addition, the matrix compositions are safe and biodegradable.

[0460] The surface of a lesion can be any lesion, whether benign, premalignant or malignant. The disease can be a precancerous lesion, such as leukoplakia of the oral cavity or actinic keratosis of the skin, or a wound that is a traumatic wound or a post-surgical wound. Hence, methods provided herein include methods of detecting, ameliorating or treating disease in a subject that involves applying to a body surface of the subject any of the compositions provided herein. In such examples, the compositions provided herein are formulated for application to a surface of a subject. The compositions provided herein permit sustained release of the virus to the affected wound or lesion.

[0461] In some examples, the compositions can be applied directly to a surface in liquid form as a hydrogel matrix precursor, which upon exposure to the surface, will eventually stiffen or harden to a hydrogel form. In other examples, the composition can be applied as a more gel-like or semi-solid composition with a higher viscosity than a liquid composition so that it retains its geometrical form as a matrix but prior to becoming a more solid hydrogel matrix. In examples where the composition is topically applied as a composition to a body surface of the subject, an applicator can be used for application of a gel, such as using a cotton-tipped applicator or spatula. If desired a device or material can be applied to the surface (e.g. to the skin) after application of the compositions onto the surface. For example, the surface-applied compositions can be covered by a suitable patch, bandage, wrap, dressing, mesh or other similar material or device for prevention of movement and dehydration of the composition. In other examples, the surface area in which the compositions herein are applied can be closed or covered by sutures, staples, or stiches to close the area, thereby preventing movement and dehydration of the composition. In these examples, the composition is exposed directly to the site of the wond or hyperproliferative lesion, thereby allowing sustained delivery of the virus from the matrix to the affected surface.

[0462] In other examples, the compositions can be coated on a device for application to the surface of a subject, such as any of the devices described above. In particular examples, the compositions provided herein are applied or coated onto the surface of a patch, a bandage, wrap, dressing, mesh or other similar material or device for application to the surface of a subject. Upon exposure to a physiologic or high temperature, such as can occur upon exposure of the coated device to the surface of a subject, the hydrogel will form. The coated device or material can be applied or used to directly cover a wound or hyperproliferative lesion. Since the composition is contained on the device or material, the composition is exposed directly to the wound or lesion, thereby allowing sustained delivery of the virus from the matrix to the affected surface.

[0463] The surface to be treated can be any area outside the of the body of a subject. For example, the surface can be a skin surface, a mucosal surface, the surface of a lesion, the surface of a wound, or the surface of a hollow viscus. The surface can be the skin or can be an internal organ such as the surface of the gastrointestinal tract, surface of the bladder, vagina, cervix or the uterus. The surface can be pretreated, such as abraded, as discussed below, to allow for more efficient transfer to underlying tissue.

[0464] For example, the compositions provided herein can be used to treat a skin lesion. In particular examples, the lesion is a hyperproliferative skin lesion, such as skin cancer. Exemplary hyperproliferative lesions include the following: squamous cell carcinoma, basal cell carcinoma, adenoma, adenocarcinoma, linitis plastica, insulinoma, glucagonoma, gastrinoma, vipoma, cholangiocarcinoma, hepatocellular carcinoma, adenoid cystic carcinoma, carcinoid tumor, prolactinoma, oncocytoma, hurthle cell adenoma, renal cell carcinoma, endometrioid adenoma, cystadenoma, pseudomyxoma peritonei, Warthin's tumor, thymoma, thecoma, granulosa cell tumor, arrhenoblastoma, Sertoli-Leydig cell tumor, paraganglioma, pheochromocytoma, glomus tumor, melanoma, soft tissue sarcoma, desmoplastic small round cell tumor, fibroma, fibrosarcoma, myxoma, lipoma, liposarcoma, leiomyoma, leiomyosarcoma, myoma, myosarcoma, rhabdomyoma, rhabdomyosarcoma, pleomorphic adenoma, nephroblastoma, brenner tumor, synovial sarcoma, mesothelioma, dysgerminoma, germ cell tumors, embryonal carcinoma, yolk sac tumor, teratomas, dermoid cysts, choriocarcinoma, mesonephromas, hemangioma, angioma, hemangiosarcoma, angiosarcoma, hemangioendothelioma, hemangioendothelioma, Kaposi's sarcoma, hemangiopericytoma, lymphangioma, cystic lymphangioma, osteoma, osteosarcoma, osteochondroma, cartilaginous exostosis, chondroma, chondrosarcoma, giant cell tumors, Ewing's sarcoma, odontogenic tumors, cementoblastoma, ameloblastoma, craniopharyngioma gliomas mixed oligoastrocytomas, ependymoma, astrocytomas, glioblastomas, oligodendrogliomas, neuroepitheliomatous neoplasms, neuroblastoma, retinoblastoma, meningiomas, neurofibroma, neurofibromatosis, schwannoma, neurinoma, neuromas, granular cell tumors, alveolar soft part sarcomas, lymphomas, non-Hodgkin's lymphoma, lymphosarcoma, Hodgkin's disease, small lymphocytic lymphoma, lymphoplasmacytic lymphoma, mantle cell lymphoma, primary effusion lymphoma, mediastinal (thymic) large cell lymphoma, diffuse large B-cell lymphoma, intravascular large B-cell lymphoma, Burkitt lymphoma, splenic marginal zone lymphoma, follicular lymphoma, extranodal marginal zone B-cell lymphoma of mucosa-associated lymphoid tissue (MALT-lymphoma), nodal marginal zone B-cell lymphoma, mycosis fungoides, Sezary syndrome, peripheral T-cell lymphoma, angioimmunoblastic T-cell lymphoma, subcutaneous panniculitis-like T-cell lymphoma, anaplastic large cell lymphoma, hepatosplenic T-cell lymphoma, enteropathy type T-cell lymphoma, lymphomatoid papulosis, primary cutaneous anaplastic large cell lymphoma, extranodal NK/T cell lymphoma, blastic NK cell lymphoma, plasmacytoma, multiple myeloma, mastocytoma, mast cell sarcoma, mastocytosis, mast cell leukemia, langerhans cell histiocytosis, histiocytic sarcoma, langerhans cell sarcoma dendritic cell sarcoma, follicular dendritic cell sarcoma, Waldenstrom macroglobulinemia, lymphomatoid granulomatosis, acute leukemia, lymphocytic leukemia, acute lymphoblastic leukemia, acute lymphocytic leukemia, chronic lymphocytic leukemia, adult T-cell leukemia/lymphoma, plasma cell leukemia, T-cell large granular lymphocytic leukemia, B-cell prolymphocytic leukemia, T-cell prolymphocytic leukemia, precursor B lymphoblastic leukemia, precursor T lymphoblastic leukemia, acute erythroid leukemia, lymphosarcoma cell leukemia, myeloid leukemia, myelogenous leukemia, acute myelogenous leukemia, chronic myelogenous leukemia, acute promyelocytic leukemia, acute promyelocytic leukemia, acute myelomonocytic leukemia, basophilic leukemia, eosinophilic leukemia, acute basophilic leukemia, acute myeloid leukemia, chronic myelogenous leukemia, monocytic leukemia, acute monoblastic and monocytic leukemia, acute megakaryoblastic leukemia, acute myeloid leukemia and myelodysplastic syndrome, chloroma or myeloid sarcoma, acute panmyelosis with myelofibrosis, hairy cell leukemia, juvenile myelomonocytic leukemia, aggressive NK cell leukemia, polycythemia vera, myeloproliferative disease, chronic idiopathic myelofibrosis, essential thrombocytemia, chronic neutrophilic leukemia, chronic eosinophilic leukemia/hypereosinophilic syndrome, post-transplant lymphoproliferative disorder, chronic myeloproliferative disease, myelodysplastic/myeloproliferative diseases, chronic myelomonocytic leukemia and myelodysplastic syndrome. Exemplary of such lesions or cancers include, for example, basal cell carcinoma or squamous cell carcinoma.

[0465] In particular examples, the hyperproliferative lesion is a disease that can affect the skin of a subject. Examples include squamous cell carcinoma, basal cell carcinoma, melanoma, papillomas (warts), and psoriasis. The lesion can include cells such as keratinocytes, epithelial cells, skin cells, and mucosal cells.

[0466] The hyperproliferative lesion also can be a disease that affects the mouth of a subject. For example, such diseases include, but are not limited to, leukoplakia, squamous cell hyperplastic lesions, premalignant epithelial lesions, oral dysplasia, intraepithelial neoplastic lesions, focal epithelial hyperplasia and squamous carcinoma lesion. In another example, the compositions provided herein can be used to treat any mucosal surface of the body, such as the surface of the oral cavity, the surface of the esophagus, lung mucosal surface, stomach, duodenum, small intestine, large intestine, colon, rectum, vagina or bladder. The mucosal surface can be the surface of a lesion of the mucosa, such as a leukoplakia of the mouth, colon polyp or tumor. In other examples, the compositions provided herein can be used to treat a wound surface. The wound can be a traumatic wound, such as a burn, scrape, cut or other surface wound. The wound can be a post-surgical wound such as following surgical resection of a tumor.

[0467] Surgically Resected Tumor

[0468] Provided herein are methods using a VV-polymer compositions, for example VV-SELP or LIVP-SELP compositions such as any provided herein, for the treatment of tumors by delivering the oncolytic virus composition directly to a resected tumor. Delivery of the compositions herein to tumors following surgical resection permits penetration of the virus into tumors. This is advantageous over other methods of viral delivery, such as intratumoral injection, where virus is administered into three dimensional tumors and is not able to adequately penetrate or distribute throughout the tumor mass (see e.g. Nemunaitis et al. (2001) J. Clin. Oncol., 19:289-298). In addition, the application of virus compositions to a tumor bed immediately following surgical resection also can provide an effective treatment to a patient that harbors residual disease in a surgical field associated with an incomplete surgical resection. Tumor resection is the primary therapeutic option for the majority of patients diagnosed with a solid tumor. In some clinical situations, however, surgical resection can remove the majority of disease, but residual disease can be left on critical anatomic structures that are considered unresectable. In these scenarios, direct application of virus to a surface of residual disease can optimize viral delivery and tumor penetration.

[0469] Further, the application or delivery of virus in protein polymers (e.g. SELP) is advantageous over topical delivery of non-matrix viral solutions that can be hindered by inadequate or only brief contact with the tumor surface, runoff of the viral solution away from the tumor surface to the surgical cavity, rapid viral degradation at body temperature and immunologic clearance of virus that fails to infect cancer cells. Delivery of virus in a matrix as provided in the VV-protein polymer (e.g. VV-SELP, such as LIVP-SELP) compositions herein permits the composition to adhere to the tumor surface to permit prolonged viral-tumor contact, protects viral integrity within the gel at body temperature, allows for sustained viral release in vivo and facilitates effective viral infection of adjacent tumor cells. In addition, the matrix compositions are safe and biodegradable.

[0470] For example, in the methods provided herein the compositions are applied to the surface of a resected tumor, whereby at least part of a tumor has been physically removed. In the methods herein of delivering a vaccinia virus in polymer composition to a resected tumor, any solid tumor can be surgically resected. For example, for purpose of the methods herein, among the solid tumors that can be resected include those that are otherwise determined to be unresectable, for example, because it cannot be surgically resected with clear margins. For example, patients with anaplastic thyroid cancer typically present with a large tumor that cannot be surgically resected with clear margins. Clinically, physicians often consider such a tumor to be unresectable or marginally resectable, since resection does not remove all disease. Nevertheless, in the methods herein, virus compositions are applied to the surface of a resected tumor, including those that cannot be surgically resected with clear margins, thereby effecting exposure and penetration of the oncolytic virus to residual tumor cells. It is within the level of a skilled physician to determine if a tumor is resectable for purposes of delivery of a virus composition herein. Factors to be considered in determining if a tumor is resectable include, but are not limited to, its size and location, whether it has spread to other parts of the body, and if the person is healthy enough for surgery.

[0471] Methods of surgically resecting tumors are well known to one of skill in the art and can be practiced by a skilled physician. Accepted types of resection depend on the particular tumor types. The tumor can be completely resected or can be partially removed such that residual tumor remains. In the methods herein, the extent of resection of the tumor is within the level of the skilled physician and depends on factors such as the type of tumor, the size of the tumor, the state or severity of disease and the particular patient being treated. In the methods herein, compositions can be administered to resected tumors in which from or from about 10 mm³ to 300 m³ of residual tumor remains, for example, from or from about 10 mm³ to 100 mm³, 25 mm³ to 100 mm³, 50 mm³ to 100 mm³, 50 mm³ to 250 mm³ or 100 mm³ to 200 mm³. Generally, the compositions provided herein are applied to low volume residual disease, wherein equal to or less than 100 mm³, such as equal to or less than 50 mm³ of the tumor remains. For example, in the methods herein the surgical resection should remove the large bulk of the tumor and leave behind only low volume or microscopic disease, likely shaped as a sheet or a thin layer. Typically, surgery is effected to generate a flat surface or sheet of residual disease within a surgical cavity so that the compositions herein can be topically applied to the flat surface or sheet to facilitate immediate and direct contact of virus with cancer cells.

[0472] In some examples of the method herein, the compositions provided herein can be delivered by postoperative application to a resected tumor. In such examples, at the time of the treatment, the surgery should be fairly recent, and yet the patient should be fully recovered from the surgery. Typically, patients receive treatment within 24 hours to 12 weeks after surgery, such as 24 hours to 96 hours, 2 days to 7 days, 1 week to 6 weeks, and generally no more than 8-12 weeks after surgery. In other examples of the methods herein, the compositions provided herein can be delivered by intraoperative application to a resected tumor.

[0473] Upon excision of part of all of cancerous cells, tissue, or tumor, a cavity can be formed in the body. A VV-protein polymer composition provided herein, such as an VV-SELP or LIVP-SELP composition provided herein, can be topically applied to the cavity, and generally to a flat surface within the surgical cavity. The composition can be applied as a liquid composition, which then will solidify to a gel upon contact with the body surface resulting in a continuous contact with that surface to permit controlled viral release over time. In other examples, the composition can be applied at a higher viscosity, such as a gelatin-like or semi-solid gel, which then also will further solidify upon contact with the body surface resulting in a continuous contact with that surface to permit controlled viral release over time. In further examples, the compositions can be applied by exposure of the surface to a device coated with the composition, such as a bandage or wrap or other device described herein or known in the art that is capable of being coated with a virus hydrogel composition as described herein.

[0474] 2. Dosages and Dosage Regime

[0475] The dosage regimen can be any of a variety of methods and amounts, and can be determined by one skilled in the art according to known clinical factors. As is known in the medical arts, dosages for any one patient can depend on many factors, including the subject's species, size, body surface area, age, sex, immunocompetence, and general health, the particular virus to be administered, duration and route of administration, the kind and stage of the disease, for example, tumor size, and other treatments or compounds, such as chemotherapeutic drugs, being administered concurrently. In addition to the above factors, such levels can be affected by the infectivity of the virus, and the nature of the virus, as can be determined by one skilled in the art.

[0476] In the present methods, appropriate minimum dosage levels and dosage regimes of viruses in the compositions herein can be levels sufficient for the virus to survive, grow and replicate in a tumor, metastasis or other wound or lesion. Generally, the virus is administered in an amount that is at least or about or 1×10⁵ pfu. Exemplary minimum levels for administering a virus to a 65 kg human can include at least about 1×10⁵ plaque forming units (pfu), at least about 5×10⁵ pfu, at least about 1×10⁶ pfu, at least about 5×10⁶ pfu, at least about 1×10⁷ pfu, at least about 1×10⁸ pfu, at least about 1×10⁹ pfu, or at least about 1×10¹⁰ pfu. For example, the virus is administered in an amount that is at least or about or is 1×10⁵ pfu, 1×10⁶ pfu, 1×10⁷ pfu, 1×10⁸ pfu, 1×10⁹ pfu, 1×10¹⁰ pfu, 1×10¹¹ pfu, 1×10¹² pfu, 1×10¹³ pfu, or 1×10¹⁴ pfu at least one time over a cycle of administration.

[0477] In the dosage regime, the amount of virus can be delivered as a single administration or multiple times over a cycle of administration. Hence, the methods provided herein can include a single administration of a virus to a subject or multiple administrations of a virus to a subject. In some examples, a single administration is sufficient to establish a virus in a tumor, where the virus can proliferate and can cause or enhance an anti-tumor response in the subject; such methods do not require additional administrations of a virus in order to cause or enhance an anti-tumor response in a subject, which can result, for example in-inhibition of tumor growth, inhibition of metastasis growth or formation, reduction in tumor or size, elimination of a tumor or metastasis, inhibition or prevention of recurrence of a neoplastic disease or new tumor formation, or other cancer therapeutic effects.

[0478] In other examples, the virus in protein polymer (e.g. SELP) compositions can be administered on different occasions, separated in time typically by at least one day. For example, the compositions can be administered two times, three time, four times, five times, or six times or more, with one day or more, two days or more, one week or more, or one month or more time between administrations. Separate administrations can increase the likelihood of delivering a virus to a tumor or metastasis, where a previous administration has been ineffective in delivering a virus to a tumor or metastasis. Separate administrations can increase the locations on a tumor or metastasis where virus proliferation can occur or can otherwise increase the titer of virus accumulated in the tumor, which can increase the scale of release of antigens or other compounds from the tumor in eliciting or enhancing a host's anti-tumor immune response, and also can, optionally, increase the level of virus-based tumor lysis or tumor cell death. Separate administrations of a virus can further extend a subject's immune response against viral antigens, which can extend the host's immune response to tumors or metastases in which viruses have accumulated, and can increase the likelihood of a host mounting an anti-tumor immune response.

[0479] When separate administrations are performed, each administration can be a dosage amount that is the same or different relative to other administration dosage amounts. In one example, all administration dosage amounts are the same. In other examples, a first dosage amount can be a larger dosage amount than one or more subsequent dosage amounts, for example, at least 10× larger, at least 100× larger, or at least 1000× larger than subsequent dosage amounts. In one example of a method of separate administrations in which the first dosage amount is greater than one or more subsequent dosage amounts, all subsequent dosage amounts can be the same, smaller amount relative to the first administration.

[0480] Separate administrations can include any number of two or more administrations, including two, three, four, five or six administrations. One skilled in the art can readily determine the number of administrations to perform or the desirability of performing one or more additional administrations according to methods known in the art for monitoring therapeutic methods and other monitoring methods provided herein. Accordingly, the methods provided herein include methods of providing to the subject one or more administrations of a virus, where the number of administrations can be determined by monitoring the subject, and, based on the results of the monitoring, determining whether or not to provide one or more additional administrations. Deciding on whether or not to provide one or more additional administrations can be based on a variety of monitoring results, including, but not limited to, indication of tumor growth or inhibition of tumor growth, appearance of new metastases or inhibition of metastasis, the subject's anti-virus antibody titer, the subject's anti-tumor antibody titer, the overall health of the subject, the weight of the subject, the presence of virus solely in tumor and/or metastases, the presence of virus in normal tissues or organs.

[0481] The time period between administrations can be any of a variety of time periods. The time period between administrations can be a function of any of a variety of factors, including monitoring steps, as described in relation to the number of administrations, the time period for a subject to mount an immune response, the time period for a subject to clear the virus from normal tissue, or the time period for virus proliferation in the tumor or metastasis. In one example, the time period can be a function of the time period for a subject to mount an immune response; for example, the time period can be more than the time period for a subject to mount an immune response, such as more than about one week, more than about ten days, more than about two weeks, or more than about a month; in another example, the time period can be less than the time period for a subject to mount an immune response, such as less than about one week, less than about ten days, less than about two weeks, or less than about a month. In another example, the time period can be a function of the time period for a subject to clear the virus from normal tissue; for example, the time period can be more than the time period for a subject to clear the virus from normal tissue, such as more than about a day, more than about two days, more than about three days, more than about five days, or more than about a week. In another example, the time period can be a function of the time period for virus proliferation in the tumor or metastasis; for example, the time period can be more than the amount of time for a detectable signal to arise in a tumor or metastasis after administration of a virus expressing a detectable marker, such as about 3 days, about 5 days, about a week, about ten days, about two weeks, or about a month.

[0482] For example, an amount of virus is administered two times, three times, four times, five times, six times or seven times over a cycle of administration. The amount of virus can be administered on the first day of the cycle, the first and second day of the cycle, each of the first three consecutive days of the cycle, each of the first four consecutive days of the cycle, each of the first five consecutive days of the cycle, each of the first six consecutive days of the cycle, or each of the first seven consecutive days of the cycle. Generally, the cycle of administration is 7 days, 14 days, 21 days or 28 days. Depending on the responsiveness or prognosis of the patient the cycle of administration is repeated over the course of several months or years.

[0483] Generally, appropriate maximum dosage levels or dosage regimes of viruses are levels that are not toxic to the host, levels that do not cause splenomegaly of 3 times or more, levels that do not result in colonies or plaques in normal tissues or organs after about 1 day or after about 3 days or after about 7 days.

[0484] 3. Combination Therapy

[0485] The subject also can be undergoing secondary treatment for a tumor, cancer, wound or hyperproliferative surface lesion. For example, the methods herein include combination therapy with a secondary anti-cancer therapy. Examples of such therapy include, but are not limited to, surgical therapy, chemotherapy, radiation therapy, immunotherapy, treatment with another therapeutic substance or agent and/or administration with another therapeutic virus. These can be administered simultaneously, sequentially or intermittently with the compositions provided herein.

[0486] a. Oncolytic or Therapeutic Virus

[0487] Methods are provided for administering to a subject in combination with a composition provided herein another oncolytic or therapeutic virus. The additional virus can be administered as a matrix composition as provided herein or as a non-matrix composition. The virus can be any virus that is capable of effecting treatment of diseases or conditions associated with immunoprivileged cells or tissues, including proliferative disorders or conditions, including the treatment (such as inhibition) of cancerous cells, neoplasms, tumors, metastases, cancer stem cells, and other immunoprivileged cells or tissues, such as wounds and wounded or inflamed tissues. For example, the virus is an oncolytic virus. The virus can contain a heterologous gene product that encodes a therapeutic protein or that is detectable or capable of being detected. For example, the virus can be a vaccinia virus (e.g. Lister strain or LIVP), an adenovirus, an adeno-associated virus, a retrovirus, a herpes simplex virus, a reovirus, a mumps virus, a foamy virus, an influenza virus, a myxoma virus, a vesicular stomatitis virus, or any other virus described herein or known in the art, or derivatives or modified forms thereof.

[0488] The virus can be provided as combinations of compositions and/or as kits that include the virus and compositions provided herein packaged for administration and optionally including instructions therefore. The additional virus compositions can contain the viruses formulated for single dosage administration (i.e., for direct administration) and can require dilution or other additions.

[0489] Administration can be effected simultaneously, sequentially or intermittently. The time period between administrations can be any time period that achieves the desired effects, as can be determined by one skilled in the art. Selection of a time period between administrations of different viruses can be determined according to parameters similar to those for selecting the time period between administrations of the same virus, including results from monitoring steps, the time period for a subject to mount an immune response, the time period for a subject to clear virus from normal tissue, or the time period for virus proliferation in the tumor or metastasis. In one example, the time period can be a function of the time period for a subject to mount an immune response; for example, the time period can be more than the time period for a subject to mount an immune response, such as more than about one week, more than about ten days, more than about two weeks, or more than about a month; in another example, the time period can be less than the time period for a subject to mount an immune response, such as less than about one week, less than about ten days, less than about two weeks, or less than about a month. In another example, the time period can be a function of the time period for a subject to clear the virus from normal tissue; for example, the time period can be more than the time period for a subject to clear the virus from normal tissue, such as more than about a day, more than about two days, more than about three days, more than about five days, or more than about a week. In another example, the time period can be a function of the time period for virus proliferation in the tumor or metastasis; for example, the time period can be more than the amount of time for a detectable signal to arise in a tumor or metastasis after administration of a virus expressing a detectable marker, such as about 3 days, about 5 days, about a week, about ten days, about two weeks, or about a month.

[0490] b. Therapeutic Compounds

[0491] Any therapeutic or anti-cancer agent can be used as the second, therapeutic or anti-cancer agent in the combined cancer treatment methods provided herein. The methods can include administering one or more therapeutic compounds to the subject in addition to administering the compositions provided herein to a subject. Therapeutic compounds can act independently, or in conjunction with the virus, for tumor therapeutic effects. Therapeutic compounds or agents also include those that are immunotherapeutic compounds. Therapeutic compounds to be administered can be any of those provided herein or in the art.

[0492] Therapeutic compounds that can act independently include any of a variety of known chemotherapeutic compounds that can inhibit tumor growth, inhibit metastasis growth and/or formation, decrease the size of a tumor or metastasis, eliminate a tumor or metastasis, without reducing the ability of a virus to accumulate in a tumor, replicate in the tumor, and cause or enhance an anti-tumor immune response in the subject.

[0493] Therapeutic compounds that act in conjunction with the viruses include, for example, compounds that alter the expression of the viruses or compounds that can interact with a virally-expressed gene, or compounds that can inhibit virus proliferation, including compounds toxic to the virus. Therapeutic compounds that can act in conjunction with the virus include, for example, therapeutic compounds that increase the proliferation, toxicity, tumor cell killing or immune response eliciting properties of a virus, and also can include, for example, therapeutic compounds that decrease the proliferation, toxicity or cell killing properties of a virus. Optionally, the therapeutic agent can exhibit or manifest additional properties, such as, properties that permit its use as an imaging agent, as described elsewhere herein.

[0494] For example, tumors, cancers and metastasis can be a monotherapy-resistant tumor such as, for example, one that does not respond to therapy with virus alone or other therapeutic agent (e.g. anti-cancer agent alone), but that does respond to therapy with a combination of virus and other therapeutic agent (e.g. anti-cancer agent). Typically, a therapeutically effective amount of a virus composition provided herein is administered to the subject and the virus localizes and accumulates in the tumor. Subsequent to administering the virus, the subject is administered a therapeutically effective amount of another therapeutic agent, for example an anti-cancer agent, such as a chemotherapeutic agent (e.g. cisplatin). In one example, the other therapeutic agent is administered once-daily for five consecutive days. One of skill in the art could determine when to administer the therapeutic agent subsequent to the virus using, for example, in vivo animal models. Using the methods provided herein, administration of a virus composition provided herein and other therapeutic agent can cause a reduction in tumor volume, can cause tumor growth to stop or be delayed or can cause the tumor to be eliminated from the subject. The status of tumors, cancers and metastasis following treatment can be monitored using any of the methods provided herein and known in the art.

[0495] Therapeutic compounds or agents include, but are not limited to, chemotherapeutic agents, nanoparticles, radiation therapy, siRNA molecules, enzyme/pro-drug pairs, photosensitizing agents, toxins, microwaves, a radionuclide, an angiogenesis inhibitor, a mitosis inhibitor protein (e.g., cdc6), an antitumor oligopeptide (e.g., antimitotic oligopeptides, high affinity tumor-selective binding peptides), a signaling modulator, anti-cancer antibiotics, or a combination thereof.

[0496] Exemplary photosensitizing agents include, but are not limited to, for example, indocyanine green, toluidine blue, aminolevulinic acid, texaphyrins, benzoporphyrins, phenothiazines, phthalocyanines, porphyrins such as sodium porfimer, chlorins such as tetra(m-hydroxyphenyl)chlorin or tin(IV) chlorin e6, purpurins such as tin ethyl etiopurpurin, purpurinimides, bacteriochlorins, pheophorbides, pyropheophorbides or cationic dyes. In one example, a vaccinia virus, such as a vaccinia virus provided herein, is administered to a subject having a tumor, cancer or metastasis in combination with a photosensitizing agent.

[0497] Radionuclides, which depending up the radionuclide, amount and application can be used for diagnosis and/or for treatment. They include, but are not limited to, for example, a compound or molecule containing ³²Phosphorus, ⁶⁰Cobalt, ⁹⁰Yttrium, ⁹⁹Technitium, ¹⁰³Palladium, ¹⁰⁶Ruthenium, ¹¹¹Indium, ¹¹⁷Lutetium, ¹²⁵Iodine, ¹³¹Iodine, ¹³⁷Cesium, ¹⁵³Samarium, ¹⁸⁶Rhenium, ¹⁸⁸Rhenium, ¹⁹²Iridium, ¹⁹⁸Gold, ²¹¹Astatine, ²¹²Bismuth or ²¹³Bismuth. In one example, a vaccinia virus, such as a vaccinia virus provided herein, is administered to a subject having a tumor, cancer or metastasis in combination with a radionuclide.

[0498] Toxins include, but are not limited to, chemotherapeutic compounds such as, but not limited to, 5-fluorouridine, calicheamicin and maytansine. Signaling modulators include, but are not limited to, for example, inhibitors of macrophage inhibitory factor, toll-like receptor agonists and stat3 inhibitors. In one example, a vaccinia virus, such as a vaccinia virus provided herein, is administered to a subject having a tumor, cancer or metastasis in combination with a toxin or a signaling modulator.

[0499] Chemotherapeutic compounds include, but are not limited to, alkylating agents such as thiotepa and cyclophosphamide; alkyl sulfonates such as busulfan, improsulfan and piposulfan; aziridines such as benzodepa, carboquone, meturedepa and uredepa; ethylenimine and methylmelamines, including altretamine, triethylenemelamine, triethylenephosphoramide, triethylenethiophosphoramide and trimethylmelamine nitrogen mustards such as chlorambucil, chlornaphazine, chlorophosphamide, estramustine, ifosfamide, mechlorethamine, mechlorethamine oxide hydrochloride, melphalan, novobiocin, phenesterine, prednimustine, trofosfamide, uracil mustard; nitrosoureas such as carmustine, chlorozotocin, fotemustine, lomustine, nimustine, ranimustine; antibiotics such as aclacinomycins, actinomycin, anthramycin, azaserine, bleomycins, cactinomycin, calicheamicin, carubicin, caminomycin, carzinophilin, chromomycins, dactinomycin, daunorubicin, detorubicin, 6-diazo-5-oxo-L-norleucine, doxorubicin, epirubicin, esorubicin, idarubicin, marcellomycin, mitomycins, mycophenolic acid, nogalamycin, olivomycins, peplomycin, porfiromycin, puromycin, quelamycin, rodorubicin, streptonigrin, streptozocin, tubercidin, ubenimex, zinostatin, zorubicin; anti-metabolites such as methotrexate and 5-fluorouracil (5-FU); folic acid analogues such as denopterin, methotrexate, pteropterin, trimetrexate; purine analogs such as fludarabine, 6-mercaptopurine, thiamiprine, thioguanine; pyrimidine analogs such as ancitabine, azacitidine, 6-azauridine, carmofur, cytarabine, dideoxyuridine, doxifluridine, enocitabine, floxuridine; androgens such as calusterone, dromostanolone propionate, epitiostanol, mepitiostane, testolactone; anti-adrenals such as aminoglutethimide, mitotane, trilostane; folic acid replenisher such as folinic acid; aceglatone; aldophosphamide glycoside; aminolevulinic acid; amsacrine; bestrabucil; bisantrene; edatrexate; defosfamide; demecolcine; diaziquone; eflornithine; elliptinium acetate; etoglucid; gallium nitrate; hydroxyurea; lentinan; lonidamine; mitoguazone; mitoxantrone; mopidamol; nitracrine; pentostatin; phenamet; pirarubicin; podophyllinic acid; 2-ethylhydrazide; procarbazine; polysaccharide-K; razoxane; sizofiran; spirogermanium; tenuazonic acid; triaziquone; 2, 2′,2″-trichlorotriethylamine; urethan; vindesine; dacarbazine; mannomustine; mitobronitol; mitolactol; pipobroman; gacytosine; cytosine arabinoside; cyclophosphamide; thiotepa; taxoids, e.g., paclitaxel and docetaxel; chlorambucil; gemcitabine; 6-thioguanine; mercaptopurine; methotrexate; platinum analogs such as cisplatin and carboplatin; vinblastine; platinum; etoposide (VP-16); ifosfamide; mitomycin C; mitoxantrone; vincristine; vinorelbine; Navelbine; Novantrone; teniposide; daunomycin; aminopterin; Xeloda; ibandronate; CPT11; topoisomerase inhibitor RFS 2000; difluoromethylornithine (DMFO); retinoic acid; esperamycins; capecitabine; and pharmaceutically acceptable salts, acids or derivatives of any of the above. Also included are anti-hormonal agents that act to regulate or inhibit hormone action on tumors such as anti-estrogens including for example tamoxifen, raloxifene, aromatase inhibiting 4(5)-imidazoles, 4-hydroxytamoxifen, trioxifene, keoxifene, LY117018, onapristone and toremifene (Fareston); and antiandrogens such as flutamide, nilutamide, bicalutamide, leuprolide and goserelin; and pharmaceutically acceptable salts, acids or derivatives of any of the above. Such chemotherapeutic compounds that can be used herein include compounds whose toxicities preclude use of the compound in general systemic chemotherapeutic methods. Chemotherapeutic agents also include new classes of targeted chemotherapeutic agents such as, for example, imatinib (sold by Novartis under the trade name Gleevec in the United States), gefitinib (developed by AstraZeneca under the trade name Iressa) and erlotinib. Particular chemotherapeutic agents include, but are not limited to, cisplatin, carboplatin, oxaliplatin, DWA2114R, NK121, IS 3 295, and 254-S vincristine, prednisone, doxorubicin and L-asparaginase; mechlorethamine, vincristine, procarbazine and prednisone (MOPP), cyclophosphamide, vincristine, procarbazine and prednisone (C-MOPP), bleomycin, vinblastine, gemcitabine and 5-fluorouracil. Exemplary chemotherapeutic agents are, for example, cisplatin, carboplatin, oxaliplatin, DWA2114R, NK121, IS 3 295, and 254-S.

[0500] Exemplary anti-cancer antibiotics include, but are not limited to, anthracyclines such as doxorubicin hydrochloride (adriamycin), idarubicin hydrochloride, daunorubicin hydrochloride, aclarubicin hydrochloride, epirubicin hydrochloride and pirarubicin hydrochloride, phleomycins such as phleomycin and peplomycin sulfate, mitomycins such as mitomycin C, actinomycins such as actinomycin D, zinostatinstimalamer and polypeptides such as neocarzinostatin.

[0501] Anti-cancer antibodies include, but are not limited to, Rituximab (RITUXAN), ADEPT, Trastuzumab (HERCEPTIN), Tositumomab (BEXXAR), Cetuximab (ERBITUX), Ibritumomab (ZEVALIN), Alemtuzumab (Campath-1H), Epratuzumab (Lymphocide), Gemtuzumab ozogamicin (MYLOTARG), Bevacizumab (AVASTIN), and Edrecolomab (PANOREX).

[0502] Cancer growth inhibitors use cell-signaling molecules which control the growth and multiplication of cells, such as cancer cells. Drugs that block these signaling molecules can stop cancers from growing and dividing. Cancer growth inhibitors include drugs that block tyrosine kinases (i.e. tyrosine kinase inhibitors; TKIs) or that inhibit the proteasome inhibitors. Examples of TKIs include, but are not limited to, Erlotinib (Tarceva, OSI-774), Iressa (Gefitinib, ZD 1839), Imatinib (Glivec, STI 571) and Bortezomib (Velcade).

[0503] In one example, nanoparticles can be designed such that they carry one or more therapeutic agents provided herein. Additionally, nanoparticles can be designed to carry a molecule that targets the nanoparticle to the tumor cells. In one non-limiting example, nanoparticles can be coated with a radionuclide and, optionally, an antibody immunoreactive with a tumor-associated antigen. In one example, a vaccinia virus in protein polymer composition, such as any provided herein, is administered to a subject having a tumor, cancer or metastasis in combination with a nanoparticle carrying any of the therapeutic agents provided herein.

[0504] Radiation therapy has become a foremost choice of treatment for a majority of cancer patients. The wide use of radiation treatment stems from the ability of gamma-irradiation to induce irreversible damage in targeted cells with the preservation of normal tissue function. Ionizing radiation triggers apoptosis, the intrinsic cellular death machinery in cancer cells, and the activation of apoptosis seems to be the principal mode by which cancer cells die following exposure to ionizing radiation. In one example, a vaccinia virus in protein polymer composition, such as any provided herein, is administered to a subject having a tumor, cancer or metastasis in combination with radiation therapy.

[0505] Therapeutic compounds also include those that can act in conjunction with the virus to increase the proliferation, toxicity, tumor cell killing or immune response eliciting properties of a virus are compounds that can alter gene expression, where the altered gene expression can result in an increased killing of tumor cells or an increased anti-tumor immune response in the subject. A gene expression-altering compound can, for example, cause an increase or decrease in expression of one or more viral genes, including endogenous viral genes and/or exogenous viral genes. For example, a gene expression-altering compound can induce or increase transcription of a gene in a virus such as an exogenous gene that can cause cell lysis or cell death, that can provoke an immune response, that can catalyze conversion of a prodrug-like compound, or that can inhibit expression of a tumor cell gene. Any of a wide variety of compounds that can alter gene expression are known in the art, including IPTG and RU486. Exemplary genes whose expression can be up-regulated include proteins and RNA molecules, including toxins, enzymes that can convert a prodrug to an anti-tumor drug, cytokines, transcription regulating proteins, siRNA and ribozymes. In another example, a gene expression-altering compound can inhibit or decrease transcription of a gene in a virus such as a heterologous gene that can reduce viral toxicity or reduces viral proliferation. Any of a variety of compounds that can reduce or inhibit gene expression can be used in the methods provided herein, including siRNA compounds, transcriptional inhibitors or inhibitors of transcriptional activators. Exemplary genes whose expression can be down-regulated include proteins and RNA molecules, including viral proteins or RNA that suppress lysis, nucleotide synthesis or proliferation, and cellular proteins or RNA molecules that suppress cell death, immunoreactivity, lysis, or viral replication.

[0506] In another example, therapeutic compounds that can act in conjunction with the virus to increase the proliferation, toxicity, tumor cell killing, or immune response eliciting properties of a virus are compounds that can interact with a virally expressed gene product, and such interaction can result in an increased killing of tumor cells or an increased anti-tumor immune response in the subject. A therapeutic compound that can interact with a virally-expressed gene product can include, for example a prodrug or other compound that has little or no toxicity or other biological activity in its subject-administered form, but after interaction with a virally expressed gene product, the compound can develop a property that results in tumor cell death, including but not limited to, cytotoxicity, ability to induce apoptosis, or ability to trigger an immune response. In one non-limiting example, the virus carries an enzyme into the cancer cells. Once the enzyme is introduced into the cancer cells, an inactive form of a chemotherapy drug (i.e., a prodrug) is administered. When the inactive prodrug reaches the cancer cells, the enzyme converts the prodrug into the active chemotherapy drug, so that it can kill the cancer cell. Thus, the treatment is targeted only to cancer cells and does not affect normal cells. The prodrug can be administered concurrently with, or sequentially to, the virus. A variety of prodrug-like substances are known in the art and an exemplary set of such compounds are disclosed elsewhere herein, where such compounds can include gancyclovir, 5-fluorouracil, 6-methylpurine deoxyriboside, cephalosporin-doxorubicin, 4-[(2-chloroethyl)(2-mesyloxyethyl)amino]benzoyl-L-glutamic acid, acetaminophen, indole-3-acetic acid, CB1954, 7-ethyl-10-[4-(1-piperidino)-1-piperidino]carbonyloxycamptothecin, bis-(2-chloroethyl)amino-4-hydroxyphenyl-aminomethanone 28, 1-chloromethyl-5-hydroxy-1,2-dihydro-3H-benz[e]indole, epirubicin-glucuronide, 5′-deoxy-5-fluorouridine, cytosine arabinoside, linamarin, and a nucleoside analogue (e.g., fluorouridine, fluorodeoxyuridine, fluorouridine arabinoside, cytosine arabinoside, adenine arabinoside, guanine arabinoside, hypoxanthine arabinoside, 6-mercaptopurineriboside, theoguanosine riboside, nebularine, 5-iodouridine, 5-iododeoxyuridine, 5-bromodeoxyuridine, 5-vinyldeoxyuridine, 9-[(2-hydroxy)ethoxy]methylguanine (acyclovir), 9-[(2-hydroxy-1-hydroxymethyl)-ethoxy]methylguanine (DHPG), azauridien, azacytidine, azidothymidine, dideoxyadenosine, dideoxycytidine, dideoxyinosine, dideoxyguanosine, dideoxythymidine, 3′-deoxyadenosine, 3′-deoxycytidine, 3′-deoxyinosine, 3′-deoxyguanosine, 3′-deoxythymidine).

[0507] In another example, therapeutic compounds that can act in conjunction with the virus to decrease the proliferation, toxicity or cell killing properties of a virus are compounds that can inhibit viral replication, inhibit viral toxins or cause viral death. A therapeutic compound that can inhibit viral replication, inhibit viral toxins, or cause viral death can generally include a compound that can block one or more steps in the viral life cycle, including, but not limited to, compounds that can inhibit viral DNA replication, viral RNA transcription, viral coat protein assembly, outer membrane or polysaccharide assembly. Any of a variety of compounds that can block one or more steps in a viral life cycle are known in the art, including any known antiviral compound (e.g., cidofovir), viral DNA polymerase inhibitors, viral RNA polymerase inhibitors, inhibitors of proteins that regulate viral DNA replication or RNA transcription. In another example, a virus can contain a gene encoding a viral life cycle protein, such as DNA polymerase or RNA polymerase that can be inhibited by a compound that is, optionally, non-toxic to the host organism.

[0508] Therapeutic compounds also include, but are not limited to, compounds that exert an immunotherapeutic effect, stimulate or suppress the immune system, carry a therapeutic compound, or a combination thereof. Such therapeutic compounds include, but are not limited to, anti-cancer antibodies, radiation therapy, siRNA molecules and compounds that suppress the immune system (i.e. immunosuppressors, immunosuppressive agents). In some cases, it is desirable to administer an immunosuppressive agent to a subject to suppress the immune system prior to the administration of the virus in order to minimize any adverse reactions to the virus. Exemplary immunosuppressive agents include, but are not limited to, glucocorticoids, alkylating agents, antimetabolites, cytokines and growth factors (e.g. interferons) and immunosuppressive antibodies (e.g., anti-CD3 and anti-IL2 receptor antibodies). For example, immunosuppresisive agents include biological response modifiers, such as monoclonal antibodies (mAbs), cancer vaccines, growth factors for blood cells, cancer growth inhibitors, anti-angiogenic factors, interferon alpha, interleukin-2 (IL-2), gene therapy and BCG vaccine for bladder cancer

[0509] Cytokines and growth factors include, but are not limited to, interleukins, such as, for example, interleukins (e.g. interleukin-1, interleukin-2, interleukin-6 and interleukin-12), tumor necrosis factors, such as tumor necrosis factor alpha (TNF-α), interferons such as interferon gamma (IFN-γ) or interferon alpha (IFN-α), Granulocyte Colony Stimulating Factor (G-CSF; also called filgrastim (Neupogen) or lenograstim (Granocyte)), Granulocyte and Macrophage Colony Stimulating Factor (GM-CSF; also called molgramostim), angiogenins, erythropoietin (EPO) and tissue factors.

[0510] Cancer vaccines include, for example, antigen vaccines, whole cell vaccines, dendritic cell vaccines, DNA vaccines and anti-idiotype vaccines. Antigen vaccines are vaccines made from tumor-associated antigens in, or produced by, cancer cells. Antigen vaccines stimulate a subject's immune system to attack the cancer. Whole cell vaccines are vaccines that use the whole cancer cell, not just a specific antigen from it, to make the vaccine. The vaccine is made from a subject's own cancer cells, another subject's cancer cells or cancer cells grown in a laboratory. The cells are treated in the laboratory, usually with radiation, so that they can't grow, and are administered to the subject via injection or through an intravenous drip into the bloodstream so they can stimulate the immune system to attack the cancer. One type of whole cell vaccine is a dendritic cell vaccine, which help the immune system to recognize and attack abnormal cells, such as cancer cells. Dendritic cell vaccines are made by growing dendritic cells alongside the cancer cells in the lab. The vaccine is administered to stimulate the immune system to attack the cancer. Anti-idiotype vaccines are vaccines that stimulate the body to make antibodies against cancer cells. Cancer cells make some tumor-associated antigens that the immune system recognizes as foreign. But because cancer cells are similar to non-cancer cells, the immune system can respond weakly. DNA vaccines boost the immune response. DNA vaccines are made from DNA from cancer cells that carry the genes for the tumor-associated antigens. When a DNA vaccine is injected, it enables the cells of the immune system to recognize the tumor-associated antigens, and activates the cells in the immune system (i.e., breaking tolerance).

[0511] The dose scheme of the combination therapy administered is such that the combination of the two or more therapeutic modalities is therapeutically effective. Dosages will vary in accordance with such factors as the age, health, sex, size and weight of the patient, the route of administration, the toxicity of the drugs, frequency of treatment and the relative susceptibilities of the cancer to each of the therapeutic modalities. For combination therapies with additional therapeutic agents provided herein (e.g. chemotherapeutic compounds), dosages for the administration of such compounds are known in the art or can be determined by one skilled in the art according to known clinical factors (e.g., subject's species, size, body surface area, age, sex, immunocompetence, and general health, duration and route of administration, the kind and stage of the disease, for example, tumor size, and other viruses, treatments, or compounds, such as other chemotherapeutic drugs, being administered concurrently). As will be understood by one of skill in the art, the optimal treatment regimen will vary and it is within the scope of the treatment methods to evaluate the status of the disease under treatment and the general health of the patient prior to, and following one or more cycles of combination therapy in order to determine the optimal therapeutic combination.

[0512] 4. Monitoring

[0513] The methods provided herein can further include one or more steps of monitoring the subject, monitoring the tumor, and/or monitoring the virus administered to the subject. Any of a variety of monitoring steps can be included in the methods provided herein, including, but not limited to, monitoring tumor size, monitoring anti-(tumor antigen) antibody titer, monitoring the presence and/or size of metastases, monitoring the subject's lymph nodes, monitoring the subject's weight or other health indicators including blood or urine markers, monitoring anti-(viral antigen) antibody titer, monitoring viral expression of a detectable gene product, and directly monitoring viral titer in a tumor, tissue or organ of a subject.

[0514] The purpose of the monitoring can be for assessing the health state of the subject or the progress of therapeutic treatment of the subject, or can be for determining whether or not further administration of the same or a different virus is warranted, or for determining when or whether or not to administer a compound to the subject where the compound can act to increase the efficacy of the therapeutic method, or the compound can act to decrease the pathogenicity of the virus administered to the subject.

[0515] a. Monitoring Viral Gene Expression

[0516] In some examples, the methods provided herein can include monitoring one or more virally expressed genes. Viruses can express one or more detectable gene products, including but not limited to, detectable proteins (e.g. luminescent or fluorescent proteins) or proteins that induce a detectable signal (e.g. proteins that bind or transport detectable compounds or modify substrates to produce a signal). The infected cells/tissue can thus be imaged by one more optical or non-optical imaging methods.

[0517] Measurement of a detectable gene product expressed by a virus can provide an accurate determination of the level of virus present in the subject. The detectable gene product can be measured by methods, such as for example, by imaging methods including, but not limited to, magnetic resonance, fluorescence, and tomographic methods, can determine the localization of the virus in the subject. Accordingly, the methods provided herein that include monitoring a detectable viral gene product can be used to determine the presence or absence of the virus in one or more organs or tissues of a subject, and/or the presence or absence of the virus in a tumor or metastases of a subject. Further, the methods provided herein that include monitoring a detectable viral gene product can be used to determine the titer of virus present in one or more organs, tissues, tumors or metastases.

[0518] Since methods provided herein can be used to monitor the amount of viruses at any particular location in a subject, the methods that include monitoring the localization and/or titer of viruses in a subject can be performed at multiple time points, and, accordingly can determine the rate of viral replication in a subject, including the rate of viral replication in one or more organs or tissues of a subject; accordingly, the methods of monitoring a viral gene product can be used for determining the replication competence of a virus. The methods provided herein also can be used to quantitate the amount of virus present in a variety of organs or tissues, and tumors or metastases, and can thereby indicate the degree of preferential accumulation of the virus in a subject; accordingly, the viral gene product monitoring methods provided herein can be used in methods of determining the ability of a virus to accumulate in tumor or metastases in preference to normal tissues or organs. Since the viruses used in the methods provided herein can accumulate in an entire tumor or can accumulate at multiple sites in a tumor, and can also accumulate in metastases, the methods provided herein for monitoring a viral gene product can be used to determine the size of a tumor or the number of metastases that are present in a subject. Monitoring such presence of viral gene product in tumor or metastasis over a range of time can be used to assess changes in the tumor or metastasis, including growth or shrinking of a tumor, or development of new metastases or disappearance of metastases, and also can be used to determine the rate of growth or shrinking of a tumor, or development of new metastases or disappearance of metastases, or the change in the rate of growth or shrinking of a tumor, or development of new metastases or disappearance of metastases. Accordingly, the methods of monitoring a viral gene product can be used for monitoring a neoplastic disease in a subject, or for determining the efficacy of treatment of a neoplastic disease, by determining rate of growth or shrinking of a tumor, or development of new metastases or disappearance of metastases, or the change in the rate of growth or shrinking of a tumor, or development of new metastases or disappearance of metastases.

[0519] Any of a variety of detectable proteins can be detected in the monitoring methods provided herein; an exemplary, non-limiting list of such detectable proteins includes any of a variety of fluorescent proteins (e.g., green or red fluorescent proteins), any of a variety of luciferases, transferrin or other iron binding proteins; or receptors, binding proteins, and antibodies, where a compound that specifically binds the receptor, binding protein or antibody can be a detectable agent or can be labeled with a detectable substance (e.g., a radionuclide or imaging agent); or transporter proteins (e.g. hNET or hNIS) that can bind to and transport detectable molecules into the cell. Viruses expressing a detectable protein can be detected by a combination of the method provided herein and know in the art. Viruses expressing more than one detectable protein or two or more viruses expressing various detectable protein can be detected and distinguished by dual imaging methods. For example, a virus expressing a fluorescent protein and an iron binding protein can be detected in vitro or in vivo by low light fluorescence imaging and magnetic resonance, respectively. In another example, a virus expressing two or more fluorescent proteins can be detected by fluorescence imaging at different wavelength. In vivo dual imaging can be performed on a subject that has been administered a virus expressing two or more detectable gene products or two or more viruses each expressing one or more detectable gene products.

[0520] b. Monitoring Tumor Size

[0521] Also provided herein are methods of monitoring tumor and/or metastasis size and location. Tumor and or metastasis size can be monitored by any of a variety of methods known in the art, including external assessment methods or tomographic or magnetic imaging methods. In addition to the methods known in the art, methods provided herein, for example, monitoring viral gene expression, can be used for monitoring tumor and/or metastasis size.

[0522] Monitoring size over several time points can provide information regarding the increase or decrease in size of a tumor or metastasis, and can also provide information regarding the presence of additional tumors and/or metastases in the subject. Monitoring tumor size over several time points can provide information regarding the development of a neoplastic disease in a subject, including the efficacy of treatment of a neoplastic disease in a subject.

[0523] c. Monitoring Antibody Titer

[0524] The methods provided herein also can include monitoring the antibody titer in a subject, including antibodies produced in response to administration of a virus to a subject. The viruses administered in the methods provided herein can elicit an immune response to endogenous viral antigens. The viruses administered in the methods provided herein also can elicit an immune response to exogenous genes expressed by a virus. The viruses administered in the methods provided herein also can elicit an immune response to tumor antigens. Monitoring antibody titer against viral antigens, viral expressed exogenous gene products, or tumor antigens can be used in methods of monitoring the toxicity of a virus, monitoring the efficacy of treatment methods, or monitoring the level of gene product or antibodies for production and/or harvesting.

[0525] In one example, monitoring antibody titer can be used to monitor the toxicity of a virus. Antibody titer against a virus can vary over the time period after administration of the virus to the subject, where at some particular time points, a low anti-(viral antigen) antibody titer can indicate a higher toxicity, while at other time points a high anti-(viral antigen) antibody titer can indicate a higher toxicity. The viruses used in the methods provided herein can be immunogenic, and can, therefore, elicit an immune response soon after administering the virus to the subject. Generally, a virus against which a subject's immune system can quickly mount a strong immune response can be a virus that has low toxicity when the subject's immune system can remove the virus from all normal organs or tissues. Thus, in some examples, a high antibody titer against viral antigens soon after administering the virus to a subject can indicate low toxicity of a virus. In contrast, a virus that is not highly immunogenic can infect a host organism without eliciting a strong immune response, which can result in a higher toxicity of the virus to the host. Accordingly, in some examples, a high antibody titer against viral antigens soon after administering the virus to a subject can indicate low toxicity of a virus.

[0526] In other examples, monitoring antibody titer can be used to monitor the efficacy of treatment methods. In the methods provided herein, antibody titer, such as anti-(tumor antigen) antibody titer, can indicate the efficacy of a therapeutic method such as a therapeutic method to treat neoplastic disease. Therapeutic methods provided herein can include causing or enhancing an immune response against a tumor and/or metastasis. Thus, by monitoring the anti-(tumor antigen) antibody titer, it is possible to monitor the efficacy of a therapeutic method in causing or enhancing an immune response against a tumor and/or metastasis. The therapeutic methods provided herein also can include administering to a subject a virus that can accumulate in a tumor and can cause or enhance an anti-tumor immune response. Accordingly, it is possible to monitor the ability of a host to mount an immune response against viruses accumulated in a tumor or metastasis, which can indicate that a subject has also mounted an anti-tumor immune response, or can indicate that a subject is likely to mount an anti-tumor immune response, or can indicate that a subject is capable of mounting an anti-tumor immune response.

[0527] In other examples, monitoring antibody titer can be used for monitoring the level of gene product or antibodies for production and/or harvesting. As provided herein, methods can be used for producing proteins, RNA molecules or other compounds by expressing an exogenous gene in a virus that has accumulated in a tumor. Further provided herein are methods for producing antibodies against a protein, RNA molecule or other compound produced by exogenous gene expression of a virus that has accumulated in a tumor. Monitoring antibody titer against the protein, RNA molecule or other compound can indicate the level of production of the protein, RNA molecule or other compound by the tumor-accumulated virus, and also can directly indicate the level of antibodies specific for such a protein, RNA molecule or other compound.

[0528] d. Monitoring General Health Diagnostics

[0529] The methods provided herein also can include methods of monitoring the health of a subject. Some of the methods provided herein are therapeutic methods, including neoplastic disease therapeutic methods. Monitoring the health of a subject can be used to determine the efficacy of the therapeutic method, as is known in the art. The methods provided herein also can include a step of administering to a subject a virus. Monitoring the health of a subject can be used to determine the pathogenicity of a virus administered to a subject. Any of a variety of health diagnostic methods for monitoring disease such as neoplastic disease, infectious disease, or immune-related disease can be monitored, as is known in the art. For example, the weight, blood pressure, pulse, breathing, color, temperature or other observable state of a subject can indicate the health of a subject. In addition, the presence or absence or level of one or more components in a sample from a subject can indicate the health of a subject. Typical samples can include blood and urine samples, where the presence or absence or level of one or more components can be determined by performing, for example, a blood panel or a urine panel diagnostic test. Exemplary components indicative of a subject's health include, but are not limited to, white blood cell count, hematocrit, or reactive protein concentration.

[0530] e. Monitoring Coordinated with Treatment

[0531] Also provided herein are methods of monitoring a therapy, where therapeutic decisions can be based on the results of the monitoring. Therapeutic methods provided herein can include administering to a subject a virus, where the virus can preferentially accumulate in a tumor and/or metastasis, and where the virus can cause or enhance an anti-tumor immune response. Such therapeutic methods can include a variety of steps including multiple administrations of a particular virus, administration of a second virus, or administration of a therapeutic compound. Determination of the amount, timing or type of virus or compound to administer to the subject can be based on one or more results from monitoring the subject. For example, the antibody titer in a subject can be used to determine whether or not it is desirable to administer a virus or compound, the quantity of virus or compound to administer, and the type of virus or compound to administer, where, for example, a low antibody titer can indicate the desirability of administering additional virus, a different virus, or a therapeutic compound such as a compound that induces viral gene expression. In another example, the overall health state of a subject can be used to determine whether or not it is desirable to administer a virus or compound, the quantity of virus or compound to administer, and the type of virus or compound to administer, where, for example, determining that the subject is healthy can indicate the desirability of administering additional virus, a different virus, or a therapeutic compound such as a compound that induces viral gene expression. In another example, monitoring a detectable virally expressed gene product can be used to determine whether or not it is desirable to administer a virus or compound, the quantity of virus or compound to administer, and the type of virus or compound to administer. Such monitoring methods can be used to determine whether or not the therapeutic method is effective, whether or not the therapeutic method is pathogenic to the subject, whether or not the virus has accumulated in a tumor or metastasis, and whether or not the virus has accumulated in normal tissues or organs. Based on such determinations, the desirability and form of further therapeutic methods can be derived.

[0532] In one example, determination of whether or not a therapeutic method is effective can be used to derive further therapeutic methods. Any of a variety of methods of monitoring can be used to determine whether or not a therapeutic method is effective, as provided herein or otherwise known in the art. If monitoring methods indicate that the therapeutic method is effective, a decision can be made to maintain the current course of therapy, which can include further administrations of a virus or compound, or a decision can be made that no further administrations are required. If monitoring methods indicate that the therapeutic method is ineffective, the monitoring results can indicate whether or not a course of treatment should be discontinued (e.g., when a virus is pathogenic to the subject), or changed (e.g., when a virus accumulates in a tumor without harming the host organism, but without eliciting an anti-tumor immune response), or increased in frequency or amount (e.g., when little or no virus accumulates in tumor).

[0533] In one example, monitoring can indicate that a virus is pathogenic to a subject. In such instances, a decision can be made to terminate administration of the virus to the subject, to administer lower levels of the virus to the subject, to administer a different virus to a subject, or to administer to a subject a compound that reduces the pathogenicity of the virus. In one example, administration of a virus that is determined to be pathogenic can be terminated. In another example, the dosage amount of a virus that is determined to be pathogenic can be decreased for subsequent administration; in one version of such an example, the subject can be pre-treated with another virus that can increase the ability of the pathogenic virus to accumulate in tumor, prior to re-administering the pathogenic virus to the subject. In another example, a subject can have administered thereto a virus that is pathogenic to the subject; administration of such a pathogenic virus can be accompanied by administration of, for example, an antiviral compound (e.g., cidofovir), pathogenicity attenuating compound (e.g., a compound that down-regulates the expression of a lytic or apoptotic gene product), or other compound that can decrease the proliferation, toxicity, or cell killing properties of a virus, as described herein elsewhere. In one variation of such an example, the localization of the virus can be monitored, and, upon determination that the virus is accumulated in tumor and/or metastases but not in normal tissues or organs, administration of the antiviral compound or pathogenicity attenuating compound can be terminated, and the pathogenic activity of the virus can be activated or increased, but limited to the tumor and/or metastasis. In another variation of such an example, after terminating administration of the antiviral compound or pathogenicity attenuating compound, the presence of the virus and/or pathogenicity of the virus can be further monitored, and administration of such a compound can be reinitiated if the virus is determined to pose a threat to the host by, for example, spreading to normal organs or tissues, releasing a toxin into the vasculature, or otherwise having pathogenic effects reaching beyond the tumor or metastasis.

[0534] In another example, monitoring can determine whether or not a virus has accumulated in a tumor or metastasis of a subject. Upon such a determination, a decision can be made to further administer additional virus, a different virus or a compound to the subject. In another example, monitoring the presence of a virus in a tumor can be used in deciding to administer to the subject a compound, where the compound can increase the pathogenicity, proliferation, or immunogenicity of a virus or the compound can otherwise act in conjunction with the virus to increase the proliferation, toxicity, tumor cell killing, or immune response eliciting properties of a virus; in one variation of such an example, the virus can, for example, have little or no lytic or cell killing capability in the absence of such a compound; in a further variation of such an example, monitoring of the presence of the virus in a tumor or metastasis can be coupled with monitoring the absence of the virus in normal tissues or organs, where the compound is administered if the virus is present in tumor or metastasis and not at all present or substantially not present in normal organs or tissues; in a further variation of such an example, the amount of virus in a tumor or metastasis can be monitored, where the compound is administered if the virus is present in tumor or metastasis at sufficient levels.

### I. EXAMPLES

[0535] The following examples are included for illustrative purposes only and are not intended to limit the scope of the invention.

### Example 1

### LIVP Viruses

[0536] A. GLV-1h68

[0537] GLV-1h68 is a recombinant, replication-competent vaccinia virus derived from the vaccinia virus LIVP strain (Lister strain from the Institute of Viral Preparations, Moscow, Russia). GLV-1h68 contains an expression cassette containing a Ruc-GFP cDNA molecule (a fusion of DNA encoding Renilla luciferase and DNA encoding GFP) under the control of a vaccinia synthetic early/late promoter P_{SEL} ((P_{sEL})Ruc-GFP) inserted into the F14.5L gene locus; an expression cassette containing a DNA molecule encoding beta-galactosidase under the control of the vaccinia early/late promoter P_{7.5k} ((P_{7.5k})LacZ), DNA encoding a rat transferrin receptor positioned in the reverse orientation for transcription relative to the vaccinia synthetic early/late promoter P_{SEL} ((P_{SEL})ᵣTrfR) inserted into the TK gene locus (the resulting virus does not express transferrin receptor protein since the DNA molecule encoding the protein is positioned in the reverse orientation for transcription relative to the promoter in the cassette); and an expression cassette containing a DNA molecule encoding β-glucuronidase under the control of the vaccinia late promoter P₁₁ₖ ((P₁₁ₖ)gusA) inserted into the HA gene locus. The genome of GLV-1h68 has the sequence of nucleotides set forth in SEQ ID NO:9.

[0538] B. GLV-1h189

[0539] GLV-1h189 was generated by insertion of an expression cassette encoding TurboFP635 (set forth in SEQ ID NO:24) under the control of the vaccinia P_{SEL} promoter into the HA locus of starting strain GLV-1h68 thereby deleting the gusA expression cassette at the HA locus of starting GLV-1h68. Thus, in strain GLV-1h189, the vaccinia HA gene is interrupted within the coding sequence by a DNA fragment containing DNA encoding TurboFP635 operably linked to the vaccinia synthetic early/late promoter. The genome of GLV-1h189 has the sequence of nucleotides set forth in SEQ ID NO:20.

[0540] C. GLV-2b372

[0541] GLV-2b372 is a recombinant, replication-competent vaccinia virus generated from the LIVP clonal isolate designated LIVP 1.1.1 (SEQ ID NO:2; see e.g. International PCT Application No. PCT/US 12/033,684). GLV-2b372 contains TurboFP635 (Far-red fluorescent protein “katushka”; set forth in SEQ ID NO:24) under the control of the vaccinia synthetic early/late promoter at the TK locus. The genome of GLV-1b372 has the sequence of nucleotides set forth in SEQ ID NO:25.

### Example 2

### Effect of Silk-Elastinlike Protein Polymer (SELP) on the Infectivity of Recombinant LIVP Vaccinia Virus

[0542] GLV-1h189-SELP47K was generated by mixing a 1.29×10⁹ pfu/mL stock of GLV-1h189 virus (described in Example 1) with an equal volume of 8% SELP-47K. SELP-47K (SEQ ID NO:62) was prepared as a 12% by weight solution as previously described (U.S. Pat. No. 6,380,154; Megeed et al. (2002) Advanced Drug Delivery Reviews, 54:1075-1091; Cappello et al. (1998) Journal of Controlled Release, 53:105-117; Gustafson et al. (2010) Advanced Drug Delivery Reviews, 62:1509-1523; Haider et al. (2004) Molecular Pharmaceutics, 2:139-150) and diluted to 8% concentration in 1 mM Tris, pH 9). The mixture was incubated at room temperature for 1 hour. As a control, virus also was mixed with an equal volume of 1 mM Tris, pH9 (GLV-1h189-Tris) and also incubated for 1 hour.

[0543] To determine infectivity of the virus compositions, a viral titer assay was performed in a standard plaque assay using African green monkey kidney fibroblast CV-1 cells (ATCC No. CCL-70; American Type Culture Collection, Manassas, Va.). CV-1 cells were plated in a 24-well plate at 2.5×10⁵ cells per well and grown until near confluency. Wells containing a cell monolayer were infected with serial dilutions of the virus compositions. The cells in each well were overlayed with virus overlay medium (DMEM+5% FBS+1% Antibiotic-Antimycotic Solution+1.5% carboxymethylcellulose), and the cells were further incubated until plaques were visible. After addition of color dye to visualize the plaques, viral titer (pfu/mL) was calculated by counting the number of plaques in the well and dividing by the dilution factor (d) and volume (V) of diluted virus added to the well. The results show that the viral titer for both virus compositions were approximately the same at about 5.0×10⁸ pfu/mL. Thus, the results show that SELP does not affect vaccinia virus infectivity in cell cultures.

### Example 3

### In Vitro Infection of 8505c Anaplastic Thyroid Cancer Cells with GLV-1h68 in SELP

[0544] A. Infection of 8505c Cells with GLV-1h68

[0545] Human anaplastic thyroid carcinoma cell line 8505c (Japanese Collection of Research Bioresources Cell Bank, Shinjuku, Japan) were infected with varying concentrations of GLV-1h68 virus (described in Example 1). The 8505c cells were maintained in minimal essential medium (MEM) with 10% fetal calf serum and penicillin and streptomycin at 37° C. and 5% carbon dioxide. For infection, 8505c cells were grown overnight in 12-well plates (plated at 2×10⁴ cells per well) in 1 mL of MEM media. GLV-1h68 in MEM was added to each well at a multiplicity of infection (MOI) of 0, 0.01, 0.1, and 1.

[0546] Cell viability was assessed daily for seven days by measuring the release of intracellular lactate dehydrogenase (LDH). Cells were washed with PBS and lysed with Triton X-100 (1.35%, Sigma-Aldrich, St. Louis, Mo.) to release intracellular LDH. The supernatants were analyzed for released LDH using CytoTox 96® Non-Radioactive Cytotoxicity Assay kit (Catalog #G1780, Promega, Madison, Wis.). The CytoTox 96® Assay is a 30 minute coupled enzymatic assay in which lactate dehydrogenase catalyzes the conversion of a tetrazolium salt into a red formazan product. The product formation was monitored by measuring the absorbance at 450 nm using an EL321E spectrophotometer (BioTek Instruments). Results were expressed as the percentage of surviving cells, determined by comparing the measured LDH of each infected sample relative to control cells that were not infected. All samples were analyzed in triplicate. The results showed that GLV-1h68 dose-dependently infects and lyses 8505c cells, since at an MOI of 1, 0.1 and 0.01 there was just 1%, 5% and 23% cell viability remaining, respectively, at day 7.

[0547] Viral replication was assessed in 8505c cells that were infected with GLV-1h68 at an MOI of 0.1 as described above. Supernatants were collected daily for seven days and stored at −80° C. After thawing, standard plaque assays were performed on confluent CV-1 cells infected with serial dilutions of the thawed supernatants. All samples were measured in triplicate. The results of the assay by viral titer demonstrated viral replication in infected cells with a logarithmic viral growth from days 1 through 6. For example, at day 1, viral titer was approximately 5.0×10² pfu/mL, which steadily increased until day 6 to approximately 1×10⁶ pfu/mL. By day 7, the viral titers plateaued and were substantially the same as observed at day 6.

[0548] Thus, the results show that 8505c cells support GLV-1h68 infection and effective viral replication.

[0549] B. Infection of 8505c cells with GLV-1h68-SELP or GLV-1h68

[0550] SELP-47K (described in Example 2) that was stored frozen at −80° C. as a 12% by weight solution was thawed at room temperature and diluted with PBS or MEM to a 4% concentration. GLV-1h68-SELP47K (GLV-1h68 in 4% SELP gel) was generated by mixing a stock solution of GLV-1h68 with 4% SELP-47K to the appropriate concentrations. As a control, the same concentration of GLV-1h68 was mixed with media (MEM or PBS).

[0551] To assess infectivity, 8505c cells, plated overnight at 2×10⁴ cells per well in 24-well plates, were infected with either GLV-1h68-media, or GLV-1h68-SELP at an MOI of 1.0. Infectivity was assessed by measuring GFP expression by microscopy at 12, 24, 36 and 48 hours using a fluorescence inverted microscope (Nikon Eclipse TS100, Nikon, Japan). Cells infected with GLV-1h68-SELP and GLV-1h68-MEM exhibited identical intensity of GFP expression by microscopy at 12, 24, 36, and 48 hours. For both groups, GFP expression was not substantially detectable at 12 hours, but was measurable at 24 hours. There also was a decreased GFP expression observed at 48 hours, which reflects expected decreased cell viability from viral cytotoxic effects.

[0552] The ability of GLV-1h68 to infect and replicate in cells under a solidified layer of SELP also was assessed. 8505c cells were plated overnight at 2×10⁴ cells per well in 24-well plates as described above. A 4% SELP was layered over the cells and allowed to solidify for 10 minutes. GLV-1h68 in 50 μL PBS was injected at an MOI of 1.0 by micropipette under the solidified layer of SELP. When compared to the other two groups of GLV-1h68-media and GLV-1h68-SELP47K, cells infected with the identical amount of GLV-1h68 injected under a solidified layer of SELP showed diminished GFP expression.

[0553] Cell lysis by each of the virus-treated or control groups also was assessed. A confluent monolayer of 8505c cells in wells of a 24-well plate were infected with GLV-1h68-MEM or GLV-1h68-SELP47K at an MOI of 1.0 as described above or were infected with GLV-1h68 in 50 μL PBS under a layer of 4% SELP. As controls, cells also were infected with MEM or 4% SELP diluted in MEM. To visualize cell viability, at days 1, 2, 3, 4 and 5 cells were fixed with 20% ethanol, stained with 0.1% crystal violet for 10 minutes, washed with water and room air dried. Photographs were taken with an inverted microscope (Nikon Eclipse TS100). All samples were assessed in triplicate. The results showed that 8505c cells in media or SELP gel that were not treated with virus showed progressive 8505c growth to confluence by day 5. GLV-1h68-SELP47K and GLV-1h68-media both caused similar patterns of cell lysis by microscopy over a 5 day period. GLV-1h68 injected under a layer of SELP resulted in slightly diminished cell lysis as compared with the other two virally treated groups.

### Example 4

### Infection of CV-1 Cells with GLV-1h189-SELP or GLV-1h189

[0554] GLV-1h189-SELP47K and GLV-1h189-Tris were prepared as described in Example 2. CV-1 cells (ATCC No. CCL-70) were plated at 2×10⁴ cells per well and grown overnight in 96-well plates in 100 μL of DMEM-10. When the cells were confluent, GLV-1h189-SELP47K and GLV-1h189-Tris were added to each well at a multiplicity of infection (MOI) of 0.1, 0.01, or 0.001 for 1 hour at 37° C. Then, additional medium was added to cells infected at an MOI 0.1, 0.01 or 0.001, or inoculum was removed and fresh medium added for cells infected at an MOI of 0.01 or 0.001. For all groups, cells were allowed to grow for up to 192 hours. At various times after infection, TurboFP635 fluorescence intensity was measured using a SpectraMax M5 with an excitation/emission/cutoff of 588/635/630 nm.

[0555] For cells infected with virus at an MOI of 0.1, there was a steady increase in measured fluorescence in cells up to about 72 hours, which steadily decreased at later time points. The decrease in fluorescence was less for cells infected with GLV-1h189-Tris than for cells infected with GLV-1h189-SELP47K. For cells infected with virus at an MOI of 0.01, including cells in which the inoculum was removed, there was a steady increase in fluorescence in cells up to about 72 hours after infection, which then plateaued with similar observable fluorescence measured at the later time points up to 192 hours. The measured fluorescence was similar at all time points in cells infected with GLV-1h189-Tris and cells infected with GLV-1h189-SELP47K. At an MOI of 0.001, the fluorescence steadily increased up to 120 to 140 hours after infection and then plateaued at 192 hours, with similar levels of observed fluorescence in cells infected with GLV-1h189-Tris and cells infected with GLV-1h189-SELP47K and in cells where the inoculum was removed or was not removed. Thus, the results show that SELP-47K does not affect vaccinia virus replication in cell cultures.

### Example 5

### Effect of SELP on GLV-1h68 Tumor Cell Infection Following Intratumoral Injection into Flank Tumors

[0556] Tumors were established by injecting 5×10⁶ 8505c cells into the subcutaneous flanks of 6 week old female nude athymic mice (NCl, Bethesda, Md.) under inhalational anesthesia with isoflurane (Baxter, Deerfield, Ill.). Tumor volumes were calculated as the shape of an ellipsoid: (4/3*π)*(a/2)*(b/2)². At a mean tumor volume of 100 mm³, mice (n=5 per group) were given a single intratumoral injection with 50 μL volume of either (1) 1×10⁷ pfu of GLV-1h68-PBS, (2) 1×10⁷ pfu of GLV-1h68-SELP47K, or (3) PBS. GLV-1h68-SELP47K was prepared as described in Example 3B. Viral transgene expression, tumor volumes and body weights were measured.

A. Viral Transgene Expression Virus infection of tumors was assessed by measuring GFP expression in the tumors of mice. Mice (n=3 per group) were imaged with a Maestro In Vivo Fluoroescence Imaging System (Cambridge Research & Instrumentation, Woburn, Mass.). GFP signals were quantified by using Maestro 2.4 software. The results showed that at day 1, GFP expression in mice treated with GLV-1h68-SELP47K was barely detectable, whereas GFP expression in mice treated with GLV-1h68-PBS could be seen as early as day 1. At day 10 and later, GFP expression was slightly higher in mice treated with GLV-1h68-SELP47K compared to mice treated with GLV-1h68-PBS reflecting a continuous slow viral release from the SELP matrix and subsequent cancer cell infection. By day 25, GFP expression was barely detectable in mice treated with GLV-1h68-PBS, yet GFP expression was still slightly detectable in mice treated with GLV-1h68-SELP47K

[0557] Virus infection of tumors also was assessed by monitoring luciferase activity. At varying times post-injection of virus, 5 μL coelenterazine (0.5 μL; Biotium, Inc., Hayward, Calif.) in 95 μL PBS was injected via the retro-orbital sinus (n=5 per group) of mice under inhalational anesthesia. Luciferase activity was detected with a cooled CCD camera (Xenogen IVIS; Xenogen Corp., Caliper Life Sciences, Hopkinton, Mass.). Emitted photons were measured for 60 seconds. Images were analyzed using Living Image Software (Xenogen, Caliper Life Sciences). The results showed that mice treated with GLV-1h68-PBS or GLV-1h68-SELP47K showed peak luciferase expression at day 4, with those mice treated with GLV-1h68-PBS having slightly higher peak expression compared to those treated with GLV-1h68-SELP47K. After day 10, mice treated with GLV-1h68-SELP47K had higher levels of luciferase expression compared to those mice treated with GLV-1h68-PBS. Luciferase expression was still detectable in mice treated with GLV-1h68-SELP47K at day 20, whereas luciferase expression was barely detectable in those mice treated with GLV-1h68-PBS. As a control, mice treated only with PBS showed no detectable luciferase expression at any time-point tested.

### B. Tumor Size

[0558] The effect of intratumoral injection of GLV-1h68-PBS or GLV-1h68-SELP47K on tumor regression also was assessed by monitoring tumor volumes at various times post injection of virus. The results showed that mice treated with GLV-1h68-PBS or GLV-1h68-SELP47K showed an equivalent and complete regression of tumor volume. In both groups, tumor volume steadily decreased from a maximal volume of about 180 mm³ at day 5 to less than about 50 mm³ by days 20 to 25, and even further regression up to day 45. Thus, the results demonstrate that intratumoral injection of GLV-1h68-SELP47K provides no advantage in facilitating tumor regression in mice compared to intratumoral injection of virus alone.

### Example 6

### Effect of SELP on GLV-1h189 Infection and Replication in Tumor Cells Following Intravenous Injection

[0559] The effect of SELP on virus infection and replication following intravenous injection was evaluated using a mouse model of human prostate cancer. Male nude mice (Hsd:Athymic Nude-Foxn1^{nu}; Harlan, Indianapolis, Ind.; 4-5 weeks old) were injected subcutaneously (s.c. on the right hind leg 1.0×10⁷ cells in 100 μL PBS) with DU145 cells (ATCC No. HTB-81; American Type Culture Collection (Manassas, Va.)) to establish tumors. Four weeks following tumor cell implantation, mice were injected with 5×10⁶ pfu of GLV-1h189-SELP47K (3 mice) or GLV-1h189-PBS (2 mice) via a tail vein injection. Tumors were imaged for TurboFP635 and GFP expression with a stereo fluorescence macroimaging system (Lightools Research), at 3 and 5 days after treatment. All mice were sacrificed on day 6 after treatment. At day 6, each tumor was cut into 2 halves: one half was used for imaging and the other half was used for virus titration in CV-1 cells using a standard plaque assay.

[0560] The results show that at day 3 after treatment there was expression of viral genes in the tumors of all treated mice. Tumors of mice that were treated with GLV-1h189-SELP47K exhibited greater intensity of the TurboFP635 and GFP transgenes, demonstrating that SELP enhanced vaccinia virus replication in tumors by 3 days post-injection. Similar results were observed 5 days after injection of virus, although the overall intensity of expressed genes was higher than at day 3. In excised tumors at day 6, the transgene expression in tumors of mice treated with GLV-1h189-SELP47K remained enhanced compared to tumors of mice treated with GLV-1h189-PBS, in particular when TurboFP635 expression was imaged.

[0561] The results from assessing viral titration by standard plaque assay at day 6 confirmed the enhanced replication efficiency of SELP-coated virus in tumors. The viral titer was normalized to the half tumor size, and was depicted as pfu/gram tumor weight (pfu/gm). In excised tumors at day 6, the viral titer in tumors of mice treated with GLV-1h189-SELP47K was about 5.17×10⁸ pfu/gm, while in tumors of mice treated with GLV-1h189-PBS, the viral titer was about 2.37×10⁸ pfu/gm.

### Example 7

### Assessment of Viral Integrity and Stability with and without SELP

[0562] GLV-1h68 viral integrity was studied in SELP (GLV-1h68-SELP47K) as compared to in PBS (GLV-1h68-PBS) following incubation at 37° C. over a four week period in the absence of any cells. GLV-1h68-SELP47K was formed as a cylindrical gel of GLV-1h68 (1×10⁶ pfu) in 50 μL, of 4% SELP in PBS using insulin syringes. A solution of GLV-1h68 (1×10⁶ pfu) in 50 μL PBS was used as a control. Samples were placed in 2 mL cryogenic tubes in 1.5 mL PBS, and incubated at 37° C. in a shaking incubator to facilitate viral elution. Triplicate samples were removed at varying time points and stored at −80° C. To disrupt the SELP gels for viral titer studies, SELP samples were shaken in a TissueLyser (Qiagen, Valencia, Calif.) at 30 Hz for 2 minutes to create tiny gel particles. The method of using shaking to disrupt the gel enhanced viral recovery from SELP gel compared to other methods using vortexing or homogenizer beads. It is unlikely, however, that all viral particles in the SELP gel specimens were eluted from the solid gel matrix. Viral integrity was measured by measuring infectious GLV-1h68 viral titers using a standard plaque assay.

[0563] The results show that incubation of GLV-1h68-PBS at 37° C. exhibits a rapid decline of infectious viral plaque forming units over time, dropping off from over 8×10⁵ pfu to below 2.5×10⁵ pfu by 12 hours. GLV-1h68-SELP47K resulted in more stable infectious particle retention when incubated from 2 hours to 7 days at 37° C., with over 3.2×10⁵ pfu infectious particles retained at 7 days compared to only 2.9×10² pfu for the GLV-1h68-PBS group when incubated over the same 7 day period. Infectious viral plaque forming units were not detected in the GLV-1h68-PBS sample past one week, while infectious viral plaque forming units could be detected in the GLV-1h68-SELP47K sample for up to four weeks. Thus, the results show that SELP gel confers a protective effect against normal viral degradation that occurs at room temperature.

### Example 8

### Effect of SELP on GLV-1h68 Infection of a Partially Resected High Volume Tumor Following Topical Application

[0564] Flank tumors were established in mice as described in Example 5. To mimic an intraoperative scenario of an incomplete surgical resection with high volume residual disease, animals with 8505c flank tumors underwent general anesthesia and surgical resection, leaving approximately 120 mm³ of the deep portion of the tumor as residual disease. Tumors (n=7 per group) were then treated topically over the residual tumor with a direct application of 300 μL volume of: (1) PBS, (2) 4% SELP47K, (3) 1×10⁷ pfu of GLV-1h68-PBS, or (4) 1×10⁷ pfu of GLV-1h68-SELP47K. GLV-1h68-SELP47K was prepared as described in Example 3B. After application of the treatment to the surface of the residual tumor, the skin flap was closed with staples. Tumors were measured every other day, beginning 7 days after the surgery to allow for resolution of tissue edema and fluid/gel volume. Animals underwent in vivo luciferase imaging and quantification as described in Example 5. Tumor volumes (mm³) also were measured.

[0565] At day 12, partially resected tumors of mice topically treated with GLV-1h68-SELP47K had more than double peak expression levels of luciferase expression when compared to partially resected tumors of mice treated with GLV-1h68-PBS. This increased gene expression correlated with tumor regression. In control mice not treated with virus (PBS and 4% SELP), tumor volume steady increased from 120 mm³ at day 0 to about 200 mm³ at day 6, about 400 mm³ at day 14 and about 600 mm³ at day 19 when animals were sacrificed. For example, at day 14, the mean volume of control tumors treated with topical PBS alone was 398±142 mm³, and SELP alone was 424±86 mm³. For virus-treated groups, the tumor volume declined over the same time period for both GLV-1h68-SELP47K and GLV-1h68-PBS treated tumors. After day 12, however, the results showed significantly smaller tumor volumes for GLV-1h68-SELP47K treated tumors as compared to GLV-1h68-PBS treated tumors. For example, at day 14, the mean volume of tumors treated with topical virus was 104±5 mm³ for GLV-1h68-PBS, and 30±14 mm³ for GLV-1h68-SELP47K (p<0.05, t-test, 2-tailed).

### Example 9

### Effect of SELP on GLV-1h68 Infection of a Partially Resected Low Volume Tumor Following Topical Application

[0566] Flank tumors were established in mice as described in Example 5. The flank model described in Example 8 was modified to leave a very thin layer of residual tumor to mimic a low volume residual disease. Briefly, animals with 8505c flank tumors underwent surgical resection of the superficial tumor, leaving approximately 50 mm³ of tumor remaining as a flat surface. Tumors (n=7-8 per group) were then treated with a direct application of 50 μL volume topically over the residual tumor of: (1) PBS, (2) 1×10⁷ pfu of GLV-1h68-PBS, (3) 1×10⁷ pfu of GLV-1h68-SELP47K in 4% SELP, or (4) 1×10⁷ pfu of GLV-1h68 in tiny 4% SELP particles. GLV-1h68-SELP47K (GLV-1h68 in SELP gel) was prepared as described in Example 3B. The 4% SELP particles were created by shaking the SELP gel at 30 Hz in a TissueLyser (Qiagen, Valencia, Calif.) for two minutes to create tiny gel particles. After application to the surface of the residual tumor, the skin flap was closed with staples. Tumor volumes were measured, and animals underwent in vivo luciferase imaging as described in Example 3.

### A. Luciferase Expression

[0567] In vivo imaging demonstrated no luciferase expression in tumors of mice treated with the no virus PBS control. The results also demonstrated that for all groups where tumors were topically treated with virus, there was a steady increase in luciferase expression up until day 10 (GLV-1h68-PBS) or up until day 12 (GLV-1h68-SELP47K or GLV-1h68 in 4% SELP particles), which then decreased close to control levels at day 14. The luciferase expression was the greatest in tumors that were topically treated with GLV-1h68 in 4% SELP particles, followed by tumors treated with GLV-1h68-SELP47K and then GLV-1h68-PBS. For example, at day 12, there was more than a 2.5-fold increase in peak luciferase expression for GLV-1h68-SELP47K as compared with GLV-1h68-PBS. Also, GLV-1h68 in the SELP particles resulted in 50% higher luciferase expression at day 12 as compared to GLV-1h68-SELP47K.

### B. β-Galactosidase Expression

[0568] β-galactosidase histochemical staining was performed on excised, low volume, post-resection tumor specimens treated with topical GLV-1h68 in PBS, SELP, or SELP particles to assess lacZ expression as a measure of viral infection. Mice (n=2 per group) were sacrificed at varying time points after treatment up to 30 days post-treatment (t=12 h, day 1, 2, 4, 8, 12, 16, 24 and 30 post-treatment), and residual tumors excised, frozen in Tissue Tek (Sakura Finetek USA, Torrance, Calif.) and sectioned. Slides were fixed with 1% glutaraldehyde and stained with X-Gal (bromo-chloro-indolyl-galactopyranoside) at 1 mg/mL in 5 mM K₄Fe(CN)₆ and 2 mM MgCl₂, and counterstained with nuclear fast red. Sections were digitally photographed using an inverted microscope (Nikon Eclipse TS 100).

[0569] Tumors of mice treated with GLV-1h68-PBS exhibited maximal lacZ expression by day 8, with subsequent gradual loss of expression to nearly complete loss of expression by day 30. GLV-1h68-SELP47K or GLV-1h68 in SELP particles resulted in similar early expression of lacZ expression with maximal expression by day 8. The lacZ expression in tumors treated with GLV-1h68-SELP47K or GLV-1h68 in SELP particles was sustained over the next 22 days with intense expression even at day 30, and was consistently greater than lacZ expression in tumors treated with GLV-1h68-PBS. Thus, the results show that there was more potent and sustained viral expression in cancer cells treated with GLV-1h68 in SELP or SELP particles as compared with PBS.

### C. Tumor Regression

[0570] The increased gene expression correlated with tumor regression. In control mice not treated with virus (PBS control), tumor volume steadily increased from 50 mm³ to about 100 mm³ at day 25 post-topical application of virus. As assessed by tumor volume, the time course demonstrated greater tumor regression for tumors treated with GLV-1h68 in SELP particles, followed by GLV-1h68-SELP47K, and GLV-1h68-PBS. For example, at day 13, tumor volumes of tumors treated with GLV-1h68 in SELP particles was 8.0±3.0 mm³, while tumor volumes of tumors treated with GLV-1h68-PBS was 31.5±10.8 mm³, demonstrating that the GLV-1h68 in SELP particles groups had a lower tumor volume (p=0.05, t-test, 2-tailed). At day 13, tumor volumes of tumors treated with GLV-1h68-SELP47K was slightly higher than tumors treated with GLV-1h68 in SELP particles, but remained substantially less than tumors treated with GLV-1h68-PBS.

[0571] Topical treatment with GLV-1h68 in the SELP particles or GLV-1h68-SELP47K also led to a higher number of animals being rendered free of disease as compared with GLV-1h68 in PBS. For example, 10-12 days post-treatment about 25% of animals were determined to be free of disease when treated with GLV-1h68 in SELP particles or GLV-1h68-SELP47K, which was about 50% greater than animals treated with GLV-1h68-PBS. At day 25 days post-treatment about 50% of animals treated with GLV-1h68 in SELP particles or GLV-1h68-SELP47K were determined to be free of disease, while only about 30% of animals treated with GLV-1h68-PBS were determined to be free.

### Example 10

### Effect of Various SELP Polymers on Viral Delivery and Replication Efficiency in Tumors in Both Immune-Compromised and Immune-Competent Mouse Models

[0572] The effect of various SELP polymers on virus infection and replication following intravenous injection was evaluated in immune-compromised and immune-competent mouse models of melanoma. L1VP virus GLV-2b372 (described in Example 1) in various SELP polymers were generated by mixing a stock of GLV-2b372 (3.42×109 pfu/mL) with an equal volume of 8% SELP stock solution (dissolved in 1 mM Tris, pH 9). The mixture was incubated at room temperature for 1 hour. As a control, GLV-2b372 was mixed with an equal volume of 1 mM Tris, pH 9 and also incubated at room temperature for 1 hour. Coated virus or control was diluted into PBS to achieve a concentration of 1×10⁸ pfu/mL.

[0573] Tumors were established in C57BL/6 mice (4-5 weeks old) or nude mice (4-5 weeks old) by injecting B16-F10 mouse melanoma cells (ATCC No. CRL-6475) subcutaneously (s.c. on the right hind leg 2.0×10⁵ cells in 100 μL PBS). Fifteen (15) days following tumor cell implantation, mice were injected via a tail vein injection with 1×10⁷ pfu of GLV-2b372 (as described in Example 1) or GLV-2b372 in various SELP polymers as set forth in Table 9. Mice were sacrificed on day 6 after treatment. At day 6, tumors were excised and virus content was determined by viral titration in CV-1 cells using a standard plaque assay, and is depicted as pfu/gram tumor weight (pfu/gm).

TABLE 9
Treatment Groups

| Group | mouse strain | Number of mice | Treatment |
|---|---|---|---|
| Group 1 | nude | 10 | GL-2b372-Tris |
| Group 2 | nude | 10 | GL-2b372-SELP27CK |
| Group 3 | nude | 10 | GL-2b372-SELP47K |
| Group 4 | nude | 10 | GL-2b372-SELP815K |
| Group 5 | C57B1/6 | 10 | GL-2b372 |
| Group 6 | C57B1/6 | 10 | GL-2b372-SELP27CK |
| Group 7 | C57B1/6 | 10 | GL-2b372-SELP47K |
| Group 8 | C57B1/6 | 10 | GL-2b372-SELP815K |

[0574] The results are set forth in Table 10. The results show that the virus titer in tumors from nude mice was generally greater than from tumors from C57BL16 mice. For both nude mice and immune-competent mice, GLV-2b372-SELP-27CK and GLV-2b372-SELP-815 exhibited a higher viral titer than the GLV-2b372-Tris treated group. The viral titer of GLV-2b372-SELP47K in tumors from immune-competent mice was slightly increased compared to GLV-2b372 treated mice. In this tumor model and using the GLV-2b372 virus strain, these results show that SELP-27CK and SELP-815 enhance virus replication in tumors in both nude mice and immune-competent C57BL/6 mice.

TABLE 10
Viral Replication in Immune-Compromised and Immune-
Competent Tumor Models

| | |
|---|---|
| Mouse | Viral Titer (pfu/g) |

| Type | Treatment | Average | STDEV |
|---|---|---|---|
| Nude | GLV-2b372 | 9.16E+06 | 1.14E+07 |
| | GLV-2b372/27CK | 1.55E+07 | 3.49E+07 |
| | GLV-2b372/47K | 4.80E+06 | 6.73E+06 |
| | GLV-2b372/815K | 1.93E+07 | 4.27E+07 |
| C57BL/6 | GLV-2b372 | 1.85E+06 | 1.94E+06 |
| | GLV-2b372/27CK | 2.22E+07 | 3.64E+07 |
| | GLV-2b372/47K | 3.02E+06 | 6.57E+05 |
| | GLV-2b372/815K | 9.21E+06 | 1.31E+07 |

[0575] Since modifications will be apparent to those of skill in this art, it is intended that this invention be limited only by the scope of the appended claims.

The application's sequence listing, which the Patent Office published only in electronic form, follows.

SEQUENCE LISTING (74 sequences)

SEQ ID NO: 1 - DNA, 190167 bp, Artificial Sequence
  LIVP parental genome
ttatgagaccatcaaagagagaaagagaataaaaatatttttgtaaaactttttttatgagaccatcaaagagagaaagagaataaaaatatttttgtaaaacttttttatgagaccatcaaagagagaaagagaataaaaatatttttgtaaaacttttttatgagaccatcaaagagagaaagagaataaaaatatttttgtaaaactttttttatgagaccatcaaagagagaaagagaataaaaatatttttgtaaaactttttttatgagaccatcaaagagagaaagagaataaaaatatttttgtaaaactttttttatgagaccatcaaagagagaaagagaataaaaatatttttgtaaaactttttttatgagaccatcaaagagagaaagagaataaaaatatttttgtaaaactttttttatgagaccatcaaagagagaaagagaataaaaatatttttgtaaaactttttttatgagaccatcaaagagagaaagagaataaaaatatttttgtaaaactttttttatgagaccatcaaagagagaaagagaataaaaatatttttgtaaaactttttttatgagaccatcaaagagagaaagagaataaaaatatttttgtaaaactttttttatgagaccatcaaagagagaaagagaataaaaatatttttgtaaaactttttttatgagaccatcaaagagagaaagagaataaaaatatttttgtaaaactttttttatgagaccatcaaagagagaaagagaataaaaatatttttgtaaaactttttttatgagaccatcagaaagaggtttaatatttttgtgatactctgaaaggaaataggaataggaataggaatagtgtcataatcgtatcacactattgagacagaaaaagaagaagtcgcgagaggtaactttttgtgaatgtagttaagaacatttttgttttgcaaaccggaatatagtgtccggtacacttttttaattcgtggtgtgcctgaatcgttcgattaaccctactcatccaatttcagatgaatagagttatcgattcagacacacgctttgagttttgttgaatcgatgagtgaagtatcatcggttgcaccttcagatgccgatccgtcgacatacttgaatccatccttgacctcaagttcagatgattccttgcacatgtctccgatacgaacgctaaactctagattcttgacgcattttgtatcgacgatcgttgaaccgatgatatcttcgtaactcactttcttatgagagatgttagacccgagtactggatgggtcttgatgtcgctgtctttctcttcttcgctacatctgatgtcgatagacacttcacagtctttgatcatagcaagagcttcttcatgagtgatcgcgggagagtccttaccttgtcctggggacacgctggacaatctagcattcactgtgtttccatcagcggattctgagatggatttaatctgaggacatttggtgaatccaaagttcattctcagacctccaccgatgatggagtaataagtggtaggaggatctacatcctcgactgatgtggaatcatcttctgattccacctcgggatctggatctgactcggactctgtaatttccgttacggattggcaaatcttatcattggtcggtgtttggtcttgctttgtgactttgataataacatcgattcccatatgatgtttgttttcttcttccgtacacgaggaggaggatgaggatgattgctgaagactggcaggcatagcagctgccgccaggcacatgcatgccaggacgatatattgtttcataattgctattgattgagtactgttctttatgattctacttccttaccgtgcaataaattagaatatattttctacttttacgagaaattaattattgtatttattatttatgggtgaaaaacttactataaaaagtgggtgggtttggaattagtgatcagtttatgtatatcgcaactaccgggcatatggctatcgacatcgagaacattacccacatgataagagattgtatcagtttcgtagtcttgagtattggtattactatatagtatatagatgtcgcccactagagttactgtctccgaatgcggcatgatagtatcattctttgctttcgttaactgtttggaggaagaatctttgttattgcatttaatctcgaaattcagagtgcacacctttctcctgtaaagaaacctgaagtcgctaccttattaagaacggagaagtatccatcacgaaatacgggattacagtctttatgattcatagtaatagttagttccgacgttgagatggattcgctgagaccggtagtggtcgtccgagtacacgacgtgtcgttaactggatacaggttaatttccacatcgatatagttaaacgtatttctgggtacgggttcgcatttatctgcggaagagacggtgtgagaatatgttccgagaccacacggagaacagatgacgtctccggatactccgtatcctattccacattttgtttgggaaacacatgccttgcatccggatgatcctttgagaagacaataatatccgggagagcattcacagattctattgtgagtcgtgttacacgatcgcgtcttccgttacaacttagacaagcgggtaaatgattattgcgagatgtgaaggtacccgaaccacacggcgtacatcgtgtgttagtcttgctatcgcataatctggaagcgtatgttcccggacacaaattatggcgtttgtattcgttgtctttacactttccatcggatggtgcatgcggtgctatatctcttccgtttattattatacatgagagaaacaatatatacgagtataatacggacttcatgatttaataatgtagtaatcgttgtcttgttcctgtttcctacttctccaatcatatagatattttctttctatcatggataatatttgtaatggttctttccgtacaacatactgtttagatgatattgcgcataatttccggaggcaaatacgatagtctagattgaccgatggtagactctaatttattgagtgctttgtcgacgagtttacttttacgctccatcgatagatggcactgttctatgagatcgtcgtacatgggaaatgaaatgtgactgtctgaatgtatggctttaagatagctgtgataccgtatacaggtcggtgtcggagattcgaatctctttgaggcgacttatgtcacgatgatggaatctatcttatcgaatgatatatttttcataaatacacttttatagtcctcgtttaaacagaatttactatgtagttccgcgaatgactcgtcccttaataggcagtaggctagtatcttttttacgtagtaatcgtcgtagggagagacatcttgtagaacaacgatttcgttttgttttctcttctgtaactgcttttctggatggccgtattgattatcgagcgtgatactcgctccatattccaataaccgctttgcaaattgtatattattgacatcgaccgcgtaatatagtagagttatcgatcatatctatatcatccatgtacttgcttagtatatcaaatacatctatcagtatggtttcataacagtgatacccgcaattattaaatctcgataatatcagaccgtacatacatagacggccattgttcgatacgtgatttacagccgcgtgtccatattttccacgataaaccttacgacgtttacatcgacgagattattattaacaaagtagtcgtgtagaggatagttgttgtccgttatctaacatgcatcgaacgaccatatcgccgtaatgtaagtagtttatcagtatggcttgtacgatggattcatcctgttgtctaaatctctttagaatgttatcgatgatgtagtggttatattctctggaatcgtacgaagtaatactacgcattacgtcgacaagagtatgacgtctctcaataagaagattaacgatttccatgtctacattatatggggttactctaaatcgcttgtttagataatacgcctctaatatagggctgacgtcgtatactctacacgtgtccacatcctttattaataataatttaacaatctctatatctatggttgagaaagaccagtagtattggatgggtaaagatcctccttcgtctctgccatggatggaaacattgttatcgatcaaacatttaattacatccttggatagagattgagattctctatgagacgatatatagtaatgaagagagttcttacacatatcactgtcgtacatacaggtacgaaatacgtaaccggtgctgtaacattctgatttaagaagccatagcaatacttctggtctcggattaggcgtcgttacgtatatatccaccaatccgagaccattgattgcataattcgtattcttggacggacgtatccgtttatccacaattaggtattttagcagacgtaagtcgatattatccgaatacagatcgaaatcatttatattcgacttgagttcgttagaggaatttgaatagctggatatcagtagatgcacaatctgagattttacgtatctatgcttactgtatactcctagcggagttaatccttcgttgtttctacaaagtctctcgactccgcgagagaacaatcttaatgtctgtatcgcatttattggagacgtaacaatgtagcgcattgtttcctcgtctatctatatgttttgataagttgtgacacgtttcaatttctagttttatttttttgtacgtcacatcttcatccagtagacgacatagaatagtgcactctctaccacaataatccatagctattctggtgctaattattcctatttcacgaaggcaatcattcctcataagatgataaaaagtgtagtggagatttagtatttagcagtgcggatatgatccaagagggtgagatagtcgttctcgttcagaatctttcgcagcataagtagtatgtcgatatacttatcgttgaagactctttataaaagtctatttgtttatatttattgcggatagcagtatttccctataaaaagtatacgtcctgtggtgtctttaatcatgtacatgaatggatggtttatgtagaccttcgtacgatataccatcgaaaagttaatcgtaaatactcctgtaacggccgatgcttctgtatactcctcattaacatctataaacgtcgtatgtagaaatttttctacagtgatagtttcattacacatcttgctaaaatctgcataatatccgaatatattagtaagtcctaaattttctaaaatcggtaccagattatacggttctgtcatttccactttaaactttggcatatacaagtctatacttttagtagataacataccacaccattttttaaatttttcatctgttatatttttttctatgttatatataccttctatgtcgtccggtagtataattaccatactagagtttccctcgtatggaatatcgataatagagaatcctccgaataattcattaatatgtacatattgcaagttattctcggtacccaccatcatatcaacgctggtaactatattcttagaaatataaaacttgtctgtatatgtaagatgtttagaaaatggatatttccacattgctttaaaatggacggcgctaacaactgtcatacgagtattaatggatagcggactagtcaataaggaattaattttaccatttgtcattgtcttaacccattcgttgattagttcctttgtttggttagcattattaaagtttacagtttgaaaatcgtcttttattttttgtaggaaggaggcgtggaactcgatactatcgctaccgtatattttatttgcggtagctagtgtcgcacaatacggaatatctacctccatgtcatcattattgtcatcgggtgtattctcattcatattctctatatattttgatagttgttcagctgtagaaccagctgctccatgatttagaatagataaagtagataaaatggaaactggagaaatcaaaacattttcatcagggtgttttaagattagttctttaaagatatccatggtatagacctaacgataacgatatatatcataaataaataatgttaaatttcaatttatgtttgtaccccgtattcatacttaacaaattggtattgcgtacacaatcaatcatattacataccattaataatgcaagcataaaaaattgttagtagatgtttctaaatataggttccgtaagcaaagaatataagaatgaagcggtaatgataaaatcaatcgttatctaaaatgatcatactcatttattttattctattatattaacacatacatttttaacagcaacacattcaatattgtattgttatttttatattatttacacaattaacaatatattattagtttatattactgaattaataatataaaattcccaatcttgtcataaacacacactgagaaacagcataaacacagaatccatcaaaaatgttgataaattatctgatgttgttgttcgctgctatgataatcagatcattcgccgatagtggtaacgctatcgaaacgacattgccagaaattacaaacgctacaacagatattccagctatcagattatgcggtccagagggagatggatattgtttacacggtgactgtatccacgctagagatattgacggtatgtattgtagatgctctcatggttatacaggcattagatgtcagcatgtagtattagtagactatcaacgttcagaaaacccaaacactacaacgtcatatatcccatctcccggtattatgcttgtattagtaggcattattatgtgttgtctattatctgtttataggttcactcgacgaactaaactacctatacaagatatggttgtgccataatttttataaatttttttatgagtatttttacaaaaatgtataaagtgtatgtcttatgtatatttataaaaatgctaagtatgcgatgtatctatgttatttgtatttatctaaacaatacctctacctctagatattatacaaaaattttttatttcggcatattaaagtaaaatctagttaccttgaaaatgaatacagtgggtggttccgtatcaccagtaagaacataatagtcaaatacagtatccgattgagattttgcatacaatactagtctagaaagaaatttgtaatcatcttctgtgacgggagtccatatatctgtatcatcgtctagtttatcagtgtcccatgctatattcctgttatcatcattagttaatgaaaataactctcgtgcttcagaaaagtcaaatattgtatccatacatacatctccaaaactatcgcttatacgtttatctttaacgatacctatacctagatggttatttactaacagacattttccagatctattgactataactcctatagtttccacatcaaccaagtaatgatcatctattgttatataacaataacataactcttttccatttttatcagtatgtatatctatatcaacgtcgtcgttgtagtgaatagtagtcattgatctattatatgaaacggatatgtctagaacggcaattgttttacgtccagttaacactttcgttgatttaaagtctagagtctttgcaaacataatatccttatccgactttatatttcctgtagggtggtataattttattttgcctccacatatcggtgtttccaaatatattactagacaatattccatatagttattagttaagggtacccaattagaacacgtacgcttattatcatcatttggatcgtatttcataaaagttattgtgttatcgatgtcaacacattctacattttttaatcgtctatatagtatttttctgatattttctataatatcagaattgtcttccatcggaagttgtatactatcggaatcagttacatgtttaaataattctctgatgtcattccttatacaatcaaattcattattaaacagtttaatagtctgtagacctttatcgtcgtaaatatccattgtcttattagttacgcttatttttatgtgtttttacgttgctttattatattttataagaatgattgtttgacgaatcacgagaactattaagacacattattaggtatatattataaaaaagtttttgattacgatgttataagaggaaagaggacacattaacatcatacatcaattaactacattcttataacatcgtaatcaaaagaattgcaattttgatgtataacaactgtcaatgggttatggaattgtatattacatattatacggtatgttggtaacgacaaataccggtcggtaattgtctgccggtgtaatagaattatatatatctatctattacaccggccttgtatacataataataagttgtggtagtatgatctccatatttataatttaggactttgtattcagtatttttggaatcataaaaaataaaaaaaagttttactaatttaaaatttaaaaagtatttacatttttttcactgtttagtcgcggatatggaattcgatcctgccaaaatcaatacatcatctatagatcatgtaacaatattacaatacatagatgaaccaaatgatataagactaacagtatgcattatccgaaatattatatcaatatcacaaaaataaatacacatttggctaatcaatttcgggcttggaaaaaacgtatcgccggaagggactatatgactaacttatctagagatacaggaatacaacaatcaaaacttactgaaactatacgtaactgtcaaaaaaatagaaacatatatggtctatatatacactacaatttagttattaattggataaccgatgtgattatcaatcaatattaagagggttggtaaattggtacatagctaataatacctatactccaaatacacccaataatacaacaaccatttctgagttggatatcatcaaaatactaaataaatacgaggacgtgtatagagtaagtaaagaaaaagaatgtggaatttgctatgaagttgtttactcaaaacgatagatactttggtttattggattcgtgtactcatatattttgcataacatgcatcaatatatggcatagaacacgaagagaaaccggtgcgtcggataattgtcctatatgccgtacccgttttagaaacataacaatgagcaagttctataagctagttaactaataaataaaaagtttaatttgttgacgacgtatgtcgttattttttctcgtataaaagattaatttgattctaatataatctttagtattggataaatatcaattcaaattaattccattagattatatcataaataaaaatagtagcacacaactacttcagcaaacattctttttataaatgccatctagcgtagcgaggacacaagtgaacctataattatcaaatttattagtatcagtcacatgaaggactttacgtagagtgacgattccactatctgtggtacgaacggtttcatcttctttgatgccatcacccagatgttctataaacttggtatcctcgtccgatttcatatcctttgccaaccaatacatatagctaaactcaggcatatgttccacacatcctgaacaatgaaattctccagaagatgttacaatgtctagatttggacatttggtttcaaccgcgttaacatatgagtgaacacacccatacatgaaagcgatgagaaataggattctcatcttgccaaaatatcactagaaaaaatttatttatcagttttaaaggtataaaaaatacttattgttgctcgaatattttgtatttgatggtatacggaagattagaaatgtaggtattatcatcaactgattctatggttttatgtattctatcatgtttcactattgcgttggaaataatatcatatgcttccacatatattttattttgttttaactcataatactcacgtaattctggattattggcatatctatgaataattttagctccatgatcagtaaatattaatgagaacatagtattaccacctaccattatttttttcatctcattcaattcttaattgcaaagatctatataatcattatagcgttgacttatggactctggaatcttagacgatgtacagtcatctataatcatggcatatttaatacattgttttatagcatagtcgttatctacgatgttagatatttctctcaatgaatcaatcacacaatctaatgtaggtttatgacataatagcattttcagcagttcaatgtttttagattcgttgatggcaatggctatacatgtatatccgttatttgatctaatgttgacatctgaaccggattctagcagtaaagatactagagattgtttattatatctaacagccttgtgaagaagtgtttctcctcgtttgtcaatcatgttaatgtctttaagataaggtaggcaaatgtttatagtactaagaattgggcaagcataagacatgtcacaaagacccttttttgtatgtataagtgtaaaaattataacatccatagttggatttacataggtgtccaatcgggatctctccatcatcgagataattgatggcatctcccttccttttttagtagatatttcatcgtgtaagaatcaatattaatatttctaaagtatccgtgtatagcctctttatttaccacagctccatattccactagagggatatcgccgaatgtcatatactcaattagtatatgttggaggacatccgagttcattgttttcaatatcaaagagatggtttccttatcatttctccatagtggtacaatactacacattattccgtgcggctttccattttccaaaaacaatttgaccaaatctaaatctacatctttattgtatctataatcactatttagataatcagccataattcctcgagtgcaacatgttagatcgtctatatatgaataagcagtgttatctattcctttcattaacaatttaacgatgtctatatctatatgagatgacttaatataatattgaagagctgtacaatagtttttatctataaaagacggcttgattccgtgattaattagacatttaacaacttccggacgcacatatgctctcgtatccgactctgaatacagatgagagatgatatacagatgcaatacggtaccgcaatttcgtagttgataatcatcatacgcgtatcagtactcgtcctcataaagaacactgcagccattttctatgaacaaatcaataattttagaaacaggatcattgtcattacataattttctataactgaacgatggttttcacatttaacactcaagtcaaatccatgttctaccaacacctttatcaagtcaacgtctacatttttggatttcatatagctgaatatattaaagttatttatgttgctaaatccagtggcttctagtagagccatcgctatatccttattaactttaacatgtctactatttgtgtattcttctaatggggtaagctgtctccaatttttgcgtaatggattagtgccactgtctagtagtagtttgacgacctcgacattattacaatgctcattaaaaaggtatgcgtgtaaagcattattcttgaattggttcctggtatcattaggatctctgtctttcaacatctgtttaagttcatcaagagccacctcctcattttccaaatagtcaaacattttgactgaatgagctactgtgaactctatacacccacacaactaatgtcattaaatatcatgtcaaaaacttgtacaattattaataaaaataatttagtgtttaaattttaccagttccagattttacacctccgttaatacctccattaaccccactggacgatcctcctccccacattccaccgccaccagatgtataagttttagatcctttattactaccatcatgtccatggataaagacactccacatgccgccactaccccctttagaagacatattaataagacttaaggacaagtttaacaataaaattaatcacgagtaccctactaccaacctacactattatatgattatagtttctatttttacagtaccttgactaaagtttctagtcacaagagcaatactaccaacctacactattatatgattatagtttctatttttataggaacgcgtacgagaaaatcaaatgtctaatttctaacggtagtgttgataaacgattgttatccgcggatacctcctctatcatgtcgtctattttcttactttgttctattaacttattagcattatatattatttgattataaaacttatattgcttattagcccaatctgtaaatatcggattattaacatatcgtttctttgtaggtttatttaacatgtacatcactgtaagcatgtccttaccatttattttaatttgacgcatatccgcaatttctttttcgcagtcggttataaattctatatatgatggatacatgctacatgtgtacttataatcgactaatatgaagtacttgatacatattttcagtaacgatttattattaccacctatgaataagtacctgtgatcgtctaggtaatcaactgttttcttaatacattcgatggttggtaatttactcagaataatttccaatatcttaatatataattctgctatttctgggatatatttatctgccagtataacacaaatagtaatacatgtaaacccatattttgttattatattaatgtctgcgccattatctattaaccattctactaggctgacactatgcgactcaatacaatgataaagtatactacatccatgtttatctattttgtttatatcatcaatatacggcttacaaagttttagtatcgataacacatccaactcacgcatagagaaggtagggaataatggcataatatttattaggttatcatcattgtcattatctacaactaagtttccattttttaaaatatactcgacaactttaggatctctattgccaaatttttgaaaatatttatttatatgcttaaatctatataatgtagctccttcatcaatcatacatttaataacattgatgtatactgtatgataagatacatattctaacaatagatcttgtatagaatctgtatatcttttaagaattgtggatattaggatattattacataaactattacacaattctaaaatataaaacgtatcacggtcgaataatagttgatcaactatataattatcgattttgtgatttttcttcctaaactgtttacgtaaatagttagatagaatattcattagttcatgaccactatagttactatcgaataacgcgtcaaatatttcccgtttaatatcgcatttgtcaagataataatagagtgtggtatgttcacgataagtataataacgcatctctttttcgtgtgaaattaaatagtttattacgtccaaagatgtagcataaccatcttgtgacctagtaataatataataatagagaactgttttacccattctatcatcataatcagtggtgtagtcgtaatcgtaatcgtctaattcatcatcccaattataatattcaccagcacgtctaatctgttctattttgatcttgtatccatactgtatgttgctacatgtaggtattcctttatccaataatagtttaaacacatctacattgggatttgatgttgtagcgtatttttctacaatattaataccatttttgatactatttatttctatacctttcgaaattagtaatttcaataagtctatattgatgttatcagaacatagatattcgaatatatcaaaatcattgatatttttatagtcgactgacgacaataacaaaatcacaacatcgtttttgatattattatttttcttggtaacgtatgcctttaatggagtttcaccatcatactcatataatggatttgcaccactttctatcaatgattgtgcactgctggcatcgatgttaaatgttttacaactatcatagagtatcttatcgttaaccatgattggttgttgatgctatcgcattttttggtttctttcatttcagttatgtatggatttagcacgtttgggaagcatgagctcatatgatttcagtactgtagtgtcagtactattagtttcaataagatcaatctctagatctatagaatcaaaacacgataggtcagaagataatgaatatctgtaggcttcttgttgtactgtaacttctggttttgttagatggttgcatcgtgctttaacgtcaatggtacaaattttatcctcgctttgtgtatcatattcgtccctactataaaattgtatattcagattatcatgcgatgtgtatacgctaacggtatcaataaacggagcacaccatttagtcataaccgtaatccaaaaatttttaaagtatatcttaacgaaagaagttgtgtcattgtctacggtgtatggtactagatcctcataagtgtatatatctagagtaatgtttaatttattaaatggttgataatatggatcctcgtgacaatttccgaagatggaaataagacataaacacgcaataaatctaattgcggacatggttactccttaaaaaaatacgaataatcaccttggctatttagtaagtgtcatttaacactatactcatattaatccatggactcataatctctatacgggattaacggatgttctatatacggggatgagtagttctcttctttaactttatactttttactaatcatatttagactgatgtatgggtaatagtgtttgaagagctcgttctcatcatcagaataaatcaatatctctgtttttttgttatacagatgtattacagcctcatatattacgtaatagaacgtgtcatctaccttattaactttcaccgcatagttgtttgcaaatacggttaatcctttgacctcgtcgatttccgaccaatctgggcgtataatgaatctaaactttaattgcttgtaatcattcgaaataatttttagtttgcatccgtagttatcccctttatgtaactgtaaatttctcaacgcgatatctccattaataatgatgtcgaattcgtgctgtatacccatactgaatggatgaacgaataccgacggcgttaatagtaatttactttttcatctttacatattgggtactagttttactatcataagtttataaattccacaagctactatggaataagccaaccatcttagtataccacacatgtcttaaagtttattaattaattacatgttgttttatatatatcgctacgaatttaaagagaaattagtttaggaagaaaaattatctatctacatcatcacgtctctgtattctacgatagagtgctactttaagatgcgacagatccgtgtcatcaaatatatactccattaaaatgattattccggcagcgaacttgatattggatatatcacaacctttgttaatatctacgacaatagacagcagtcccatggttccataaacagtgagtttatctttctttgaagagatattttgtagagatcttataaaactgtcgaatgacatcgcatttatatctttagctaaatcgtatatgttaccatcgtaatatctaaccgcgtctatcttaaacgtttccatcgctttaaagacgtttccgatagatggtctcatttcatcagtcatactgagccaacaaatataatcgtgtataacatctttgatagaatcagactctaaagaaaacgaatcggctttattatacgcattcatgataaacttaatgaaaaatgtttttcgttgtttaagttggatgaatagtatgtcttaataattgttattatttcattaattaatatttagtaacgagtacactctataaaaacgagaatgacataactaatcataactagttatcaaagtgtctaggacgcgtaattttcatatggtatagatcctgtaagcattgtctgtattctggagctattttctctatcgcattagtgagttcagaatatgttataaatttaaatcgaataacgaacataactttagtaaagtcgtctatattaactcttttattttctagccatcgtaataccatgtttaagatagtatattctctagttactacgatctcatcgttgtctagaatatcacatactgaatctacatccaattttagaaattggtctgtgttacatatctcttctatattattgttgatgtattgtcgtagaaaactattacgtagaccattttctttataaaacgaatatatagtactccaattatctttaccgatatatttgcacacataatccattctctcaatcactacatctttaagattttcgttgttaagatatttggctaaactatataattctattagatcatcaacagaatcagtatatatttttctagatccaaagacgaactctttggcgtcctctataatattcccagaaaagatattttcgtgttttagtttatcgagatctgatctgttcatatacgccatgattgtacggtacgttatgataaccgcataaaataaaaatccattttcatttttaaccaatactattcataattgagattgatgtaatactttgttactttgaacgtaaagacagtacacggatccgtatctccaacaagcacgtagtaatcaaatttggtgttgttaaacttcgcaatattcatcaatttagatagaaacttatactcatcatctgttttaggaatccatgtattattaccactttccaacttatcattatcccaggctatgtttcgtccatcatcgttgcgcagagtgaataattcttttgtattcggtagttcaaatatatgatccatgcatagatcggcaaagctattgtagatgtgatttttcctaaatctaatataaaactcgtttactagcaaacactttcctgatttatcgaccaagacacatatggtttctaaatctatcaagtggtggggatccatagttatgacgcagtaacatatattattacattcttgactgtcgctaatatctaaatatttattgttatcgtattggattctgcatatagatggcttgtatgtcaaagatatagaacacataaccaatttatagtcgcgctttacattctcgaatctaaagttaagagatttagaaaacattatatcctcggatgatgttatcactgtttctggagtaggatatattaaagtctttacagatttcgtccgattcaaataaatcactaaataatatcccacattatcatctgttagagtagtatcattaaatctattatattttatgaaagatatatcactgctcacctctatatttcgtacatttttaaactgtttgtataatatctctctgatacaatcagatatatctattgtgtcggtagacgataccgttacatttgaattaatggtgttccattttacaacttttaacaagttgaccaattcatttctaatagtatcaaactctccatgattaaatattttaatagtatccattttatatcactacggacacaaagtagctgacataaaccattgtataatttttatgttttatgtttattagcgtacacattttggaagttccggcttccatgtatttcctggagagcaagtagatgatgaggaaccagatagtttatatccgtacttgcacttaaagtctacattgtcgttgtatgagtatgatcttttaaacccgctagacaagtatccgtttgatattgtaggatgtggacatttaacaatctgacacgtgggtggatcggaccattctcctcctgaacacaggacactagagttaccaatcaacgaatatccactattgcaactataagttacaacgctcccatcggtataaaaatcctcgtatccgttatgtcttccgttggatatagatggaggggattggcatttaacagattcacaaataggtgcctcgggattccataccatagatccagtagatcctaattcacaatacgatttagattcaccgatcaactgatatccgctattacaagagtacgttatactagagccaaagtctactccaccaatatcaagttggccattatcgatatctcgaggcgatgggcatctccgtttaatacattgattaaagagtgtccatccagtacctgtacatttagcatatataggtcccattttttgctttctgtatccaggtagacatagatattctatagtgtctcctatgttgtaattagcattagcatcagtctccacactattcttaaatttcatattaatgggtcgtgacggaatagtacagcatgatagaacgcatcctattcccaacaatgtcaggaacgtcacgctctccaccttcatatttatttatccgtaaaaatgttatcctggacatcgtacaaataataaaaagcccatatatgttcgctattgtagaaattgtttttcacagttgctcaaaaacgatggcagtgacttatgagttacgttacactttggagtctcatctttagtaaacatatcataatattcgatattacgagttgacatatcgaacaaattccaagtatttgattttggataatattcgtattttgcatctgctataattaagatataatcaccgcaagaacacacgaacatctttcctacatggttaaagtacatgtacaattctatccatttgtcttccttaactatatatttgtatagataattacgagtctcgtgagtaattccagtaattacatagatgtcgccgtcgtactctacagcataaactatactatgatgtctaggcatgggagacttttttatccaacgatttttagtgaaacattccacatcgtttaatactacatatttctcatacgtggtataaactccacccattacatatatatcatcgtttacgaataccgacgcgcctgaatatctaggagtaattaagtttggaagtcttatccatttcgaagtgccgtgtttcaaatattctgccacacccgttgaaatagaaaattctaatcctcctattacatataactttccatcgttaacacaagtactaacttctgattttaacgacgacatattagtaaccgttttccattttttcgttttaagatctacccgcgatacggaataaacatgtctattgttaatcatgccgccaataatgtatagacaattatgtaaaacatttgcattatagaattgtctatctgtattaccgactatcgtccaatattctgttctaggagagtaatgggttattgtggatatataatcagagtttttaatgactactatattatgttttataccatttcgtgtcactggctttgtagatttggatatagttaatcccaacaatgatatagcattgcgcatagtattagtcataaacttgggatgtaaaatgttgatgatatctacatcgtttggatttttatgtatccactttaataatatcatagctgtaacatcctcatgatttacgttaacgtcttcgtgggataagatagttgtcagttcatcctttgataattttccaaattctggatcggatgtcaccgcagtaatattgttgattatttctgacatcgacgcattatatagttttttaattccatatcttttagaaaagttaaacatccttatacaatttgtgaaattaatattatgaatcatagtttttacacatagatctactacaggcggaacatcaattattatggcagcaactagtatcatttctacattgtttatggtgatgtttatcttcttccagcgcatatagtctaatagcgattcaaacgcgtgatagtttataccattcaatataatcgcttcatcctttagatggtgatcctgaatgcgtttaaaaaaattatacggagacgccgtaataatttccttattcacttgtataatttccccattgatagaaaatattacgctttccattcttaaagtactataagtaattatagtataatgtaaacgtttatatattcaatatttttataaaaatcattttgacattaattcctttttaaatttccgtctatcatctatagaaacgtattctatgaatttataaaatgcttttacgtgtcctatcgtaggcgatagaaccgctaaaaagcctatcgaatttctacaaaagaatctgttatatggtatagggagagtataaaacattaaatgtccgtacttattaaagtattcagtagccaatcctaactctttcgaatacttattaatggctcttgttctgtacgaatctatttttttgaacaacggacctagtggtatatcttgttctatgtatctaaaataatgtctgactagatccgttagtttaatatccgcagtcatcttgtctagaatggcaaatctaactgcgggtttaggctttagtttagtttctatatctacatctatgtctttatctaacaccaaaaatataatagctaatattttattacaatcatccggatattcttctacgatctcactaactaatgtttctttggttatactagtatagtcactatcggacaaataaagaaaatcagatgatcgatgaataatacatttaaattcatcatctgtaagatttttgagatgtctcattagaatattattagggttagtactcattatcattcggcagctattacttattttattatttttcaccatatagatcaatcattagatcatcaaaatatgtttcaatcatcctaaagagtatggtgaatgactcttcccatctaatttctgaacgttcaccaatgtctctagccactttggcactaatagcgatcattcgcttagcgtcttctatattattaactggttgatttaatctatctagcaatggaccgtcggacagcgtcattctcatgttcttaatcaatgtacatacatcgccgtcatctaccaattcatccaacaacataagctttttaaaatcatcattataataggtttgatcgttgtcatttctccaaagaatatatctaataagtagagtcctcatgcttagttaacaactattttttatgttaaatcaattagtacaccgctatgtttaatacttattcatattttagtttttaggattgagaatcaatacaaaaattaatgcatcattaattttagaaatacttagtttccacgtagtcaatgaaacatttgaactcatcgtacaggacgttctcgtacaggacgtaactataaaccggtttatatttgttcaagatagatacaaatccgataactttttttacgaattctacgggatccactttaaaagtgtcataccgggttctttttatttttttaaacagatcaatggtgtgatgttgattaggtcttttacgaatttgatatagaatagcgtttacatattctccataatggtcaatcgccatttgttcgtatgtcataaattctttaattatatgacactgtgtattatttagttcatccttgttcattgttaggaatctatccaaaatggcaattatactagaactataggtgcgttgtatacacatattgatgtgtctgtttatacaatccatgatatttggatccatgctactaccttcgggtaaaattgtagcatcatataccatttctagtactttaggttcattattatccattgcagaggacgtcatgatcgaatcataaaaaaatatattatttttatgttattttgttaaaaataatcatcgaatacttcgtaagatactccttcatgaacataatcagttacaaaacgtttatatgaagtaaagtatctacgatttttacaaaagtccggatgcataagtacaaagtacgcgataaacggaataataatagatttatctagtctatctttttctatagctttcatagttagatacatggtctcagaagtaggattatgtaacatcagcttcgataaaatgactgggttatttagtcttacacattcgctcatacatgtatgaccgttaactacagagtctacactaaaatgattgaacaatagatagtctaccattgtttcgtattcagatagtacagcgtagtacatggcatcttcacaaattatatcattgtctaatagatatttgacgcatcttatggatcccacttcaacagccatcttaaaatcatattgctttcctttatcattaataatttctagaacatcatctctatcataaaagatacaaatattaactgtttgatccgtaataacattgctagtcaatagcaatttgttaataagatgcgctgggctcaatgtcttaataagaagtgtaagaggactatctccgaatttgttttgtttattaacatccgttgatggaagtaaaagatctataatgtctacattcttgactgttttagagcatacaatatggagaggtgtatttccatcatgatctggttttgagggactaattcctagtttcatcatccatgagattgtagaagcttttggattgtctgacataagatgtctatgaatatgatttttgccaaatttatccactatcctggcttcgaatccgatggacattatttttttaaacactctttctgaaggatctgtacacgccaacaacggaccacatccttcttcatcaaccgagttgttaatcttggctccatactgtaccaataaatttattctctctatgacttcatcatctgttcccgagagataatatagaggtgttttatgctgtttatcacacgcgtttggatctgcgccgtgcgtcagcagcatcgcgactattctattattattaattttagaagctatatgcaatggataatttccatcatcatccgtctcatttggagagtatcctctatgaagaagttcttcgacaaatcgttcatctagtcctttaattccacaatacgcatgtagaatgtgataattatttccagaaggttcgatagcttgtagcatattcctaaatacatctaaatttttactattatatttggcataaagagatagataatactcggccgacataatgttgtccattgtagtataaaaattaatatttctatttctatttctgtatatttgcaacaatttactctctataacaaatatcataacttagtttttttatgtcaagaaggcactggtttagttcatctataaatgtcacgccataactaccacgcatgccatactcagaattatgataaagatatttatccttggggtgtaggtaatggggattaatctttgttggatcagtctctaagttaacacatgtcacacatgatccatttatagttatatcacacgatgatgatttatgaattgattccggaagatcgctatcgtattttgtggttccacaattcatttccatacatgttattgtcacactaatattatgatgaactttatctagccgctgagtggtaaacaacagaacagatagtttattatctttaccaacaccctcagccgctgccacaaatctctgatccgtatccatgatggtcatgtttatttctagtccgtatccagtcaacactatgttagcatttctgtcgatatagctttcactcatatgacactcaccaataatagtagaattaatgtcgtaatttacaccaatagtgagttcggcggcaaagtaccaataccggtaatcttgtcgaggaggacatatagtattcttgtattctaccgaatacccgagagatgcgatacaaaagagcaagactaatttgtaaaccatcttactcaaaatatgtaacaatagtacgatgcaatgagtaagacaataggaaatctatcttatatacacataattattctatcaattttaccaattagttagtgtaatgttaacaaaaatgtgggagaatctaattagtttttctttacacaattgacgtacatgagtctgagttccttgtttttgctaattatttcatccaatttattattcttgacgatatcgagatcttttgtataggagtcaaacttgtattcaacatgcttttctataatcattttagctatttcggcatcatccaatagtacattttccagattagcagaatagatattaatgtcgtatttgaacagagcctgtaacatctcaatgtctttattatctatagccaatttaatgtccggaatgaagagaagggaattattggtgtttgtcgacgtcatatagtcgagcaagagaatcatcatatccacgtgtccattttttatagtgatgtgaatacaactaaggagaatagccagatcaaaagtagatggtatctctgaaagaaagtaggaaacaatacttacatcattaagcatgacggcatgataaaatgaagttttccatccagttttcccatagaacatcagtctccaatttttcttaacaaacagttttaccgtttgcatgttaccactatcaaccgcataatacaatgcggtgtttcccttgtcatcaaattgtgaatcatccagtccactgaatagcaaaatctttactattttggtatcttccaatgtggctgcctgatgtaatggaaattcattctctagaagatttttcaatgctccagcgttcaacaacgtacatactagacgcacgttattatcagctattgcataatacaaggcactatgtccatggacatccgccttaaatgtatctttactagagagaaagcttttcagctgcttagacttccaagtattaattcgtgacagatccatgtctgaaacgagacgctaattagtgtatattttttcattttttataattttgtcatattgcaccagaattaataatatctttaatagatctgattagtagatacatggctatcgcaaaacaacatatacacatttaataaaaataatatttattaagaaaattcagatttcacgtacccatcaatataaataaaataatgattccttacaccgtacccatattaaggagattccaccttacccataaacaatataaatccagtaatatcatgtctgatgatgaacacaaatggtgtattaaattccagtttttcaggagatgatctcgccgtagctaccataatagtagatgcctctgctacagttccttgttcgtcgacatctatctttgcattctgaaacattttataaatatataatgggtccctagtcatatgtttaaacgacgcattatctggattaaacatactaggagccatcatttcggctatcgacttaatatccctcttattttcgatagaaaatttagggagtttaagattgtacactttattccctaattgagacgaccaatagtctaattttgcagccgtgatagaatctgtgaaatgggtcatattatcacctattgccaggtacatactaatattagcatccttatacggaaggcgtaccatgtcatattctttgtcatcgattgtgattgtatttccttgcaatttagtaactacgttcatcatgggaaccgttttcgtaccgtacttattagtaaaactagcattgcgtgttttagtgatatcaaacggatattgccatatacctttaaaatatatagtattaatgattgcccatagagtattattgtcgagcatattagaatctactacattagacataccggatctacgttctactatagaattaattttattaaccgcatctcgtctaaagtttaatctatataggccgaatctatgatattgttgataatacgacggtttaatgcacacagtattatctacgaaactttgataagttagatcagtgtacgtatatttagatgttttcagcttagctaatcctgatattaattctgtaaatgctggacccagatctctttttctcaaatccatagtcttcaataattctattctagtattacctgatgcaggcaatagcgacataaacatagaaaacgaataaccaaacggtgagaagacaatattatcatcttgaatatttttatacgctactataccggcattggtaaatccttgtagacgataggcggacgctgaacacgctaacgatagtatcaataacgcaatcatgattttatggtattaataattaaccttatttttatgttcggtataaaaaaattattgatgtctacacatccttttgtaattgacatctatatatccttttgtataatcaactctaatcactttaacttttacagttttccctaccagtttatccctatattcaacatatctatccatatgcatcttaacactctctgccaagatagcttcagagtgaggatagtcaaaaagataaatatatagagcataatcattctcgtatactctgccctttattacatcacccgcattgggcaacgaataacaaaatgcaagcatcttgttaacgggctcgtaaattgggataaaaattatgtttttattgtcttatatctattttattcaagagaatattcaggaatttctttttccggttgtatctcgtcgcagtatatatcatttgtacattgtttcatattttttaatagtttacaccttttagtaggactagtatcgtacaattcatagctgtattttgaattccaatcacgcataaaaatatcttccaattgttgacgaagacctaatccatcatccggtgtaatattaatagatgctccacatgtatccgtaaagtaatttcctgtccaatttgaggtacctatataggccgttttatcggttaccatatatttggcatggtttaccctagaatacggaatgggaggatcagcatctggtacaataaatagctttacttctatatttatgtttttagattttagcatagcgatagatcttaaaaagtttctcatgataaacgaagatcgttgccagcaactaatcaatagcttaacggatacttgtctgtctatagcggatcttcttaattcatcttctatataaggccaaaacaaaattttacccgccttcgaataaataatagggataaagttcataacagatacataaacgaatttactcgcatttctaatacatgacaataaagcggttaaatcattggttctttccatagtacatagttgttgcggtgcagaagcaataaatacagagtgtggaacgccgcttacgttaatactaagaggatgatctgtattataatacgacggataaaagtttttccaattatatggtagattgttaactccaagataccagtatacctcaaaaatttgagtgagatccgctgccaagttcctattattgaagatcgcaatacccaattccttgacctgagttagtgatctccaatccatgttagcgcttcctaaataaatatgtgtattatcagatatccaaaattttgtatgaagaactcctcctaggatatttgtaatatctatgtatcgtacttcaactccggccatttgtagtctttcaacatcctttaatggtttgttagatttattaacggctactctaactcgtactcctcttttgggtaattgtacaatctcgtttaatattatcgtgccgaaattcgtacccacttcatccgataaactccaataaaaagatgatatatctagtgtttttgtggtattggatagaatttccctccacatgttaaatgtagacaaatatactttatcaaattgcatacctataggaatagtttctgtaatcactgcgattgtattatccggattcattttatttgttaaaagaataatcctatatcacttcactctattaaaaatccaagtttctatttctttcatgactgattttttaacttcatccgtttccttatgaagatgatgtttggcaccttcataaatttttatttctctattacaatttgcatgttgcatgaaataatatgcacctaaaacatcgctaatcttattgtttgttccctggagtatgagagtcggggggtgttaatcttggaaattatttttctaaccttgttggtagccttcaagacctgactagcaaatccagccttaattttttcatgattgactaatgggtcgtattggtatttataaactttatccatatctctagatactgattctggacatagctttccgactggcgcatttggtgtgatggttcccataagtttggcagctagcagattcagtcttgaaacagcatctgcattaactagaggagacattagaatcattgctgtaaacaagtttggattatcgtaagaggctagctcccatggaatgacccaataagtagatttaatagttaccacgtgctgtaccaaagtcatcaatcatcattttttcaccattacttcttccatgtccaatatgatcatgtgagaatactaaaattcctaacgatgatatgttttcagctagttcgtcataacgtccagaatgtttaccagctccatgacttatgaatactaatgccttaggatatgtaataggtttccaatatttacaatatatgtaatcattgtccagattgaacatacagtttgcactcatgattcacgttatataactatcaatattaacagttcgtttgatgatcatattatttttatgttttattgataattgtaaaaacatacaattaaatcaatatagaggaaggagacggctactgtcttttgtaagatagtcatggcgactaaattagattatgaggatgctgttttttactttgtggatgatgataaaatatgtagtcgcgactccatcatcgatctaatagatgaatatattacgtggagaaatcatgttatagtgtttaacaaagatattaccagttgtggaagactgtacaaggaattgatgaagttcgatgatgtcgctatacggtactatggtattgataaaattaatgagattgtcgaagctatgagcgaaggagaccactacatcaattttacaaaagtccatgatcaggaaagtttattcgctaccataggaatatgtgctaaaatcactgaacattggggatacaaaaagatttcagaatctagattccaatcattgggaaacattacagatttgatgaccgacgataatataaacatcttgatactttttctagaaaaaaaattgaattgatgatataggggtcttcataacgcataattattacgttagcattctatatccgtgttaaaaaaaattatcctatcatgtatttgagagttttatatgtagcaaacatgatagctgtgatgccaataagctttagatattcacgcgtgctagtgttagggatggtattatctggtggtgaaatgtccgttatataatctacaaaacaatcatcgcatatagtatgcgatagtagagtaaacatttttatagtttttactggattcatacatcgtctacccaattcggttataaatgaaattgtcgccaatcttacacccaaccccttgttatccattagcatagtattaacttcgttatttatgtcataaactgtaaatgattttgtagatgccatatcatacatgatattcatgtccctattataatcattactaactttatcacaatatatgttgataatatctatatatgatctagtctttgtgggcaactgtctatacaagtcgtctaaacgttgtttactcatatagtatcgaacagccatcattacatggtcccgttccgttgatagataatcgagtatgttagtggacttgtcaaatctatataccatattttctggaagtggatatacatagtcgtgatcaacattattgctagcctcatcttctatatcctgtactataccattatctatatcatctacataatctatgatattattacacataaacatcgacaacatactattgtttattatctaagtcctgttgatccaaacccttgatctcctctatttgtactatctagagattgtacttcttccagttctggataatatatacgttgatagattagctgagctattctatctccagtatttacattaaacgtacattttccattattaataagaatgactcctatgtttcccctataatcttcgtctattacaccacctcctatatcaatgccttttagtgacagaccagacctaggagctattctaccatagcagaacttaggcatggacatactaatatctgtcttaattaactgtctttctcctggagggatagtataatcgtaagcgctatacaaatcatatccggcagcacccggcgattgcctagtaggagatttagctctgttagtttccttaacaaatctaactggtgagttaatattcatgttgaacataaaactaatattttatttcaaaattatttaccatcccatatattccatgaataagtgtgatgattgtacacttctatagtatctatatacgatccacgataaaatcctcctatcaatagcagtttattatccactatgatcaattctggattatccctcggataaataggatcatctatcagagtccatgtattgctggattcacaataaaattccgcatttctaccaaccaagaataaccttctaccgaacactaacgcgcatgatttataatgaggataataagtggatggtccaaactgccactgatcatgattgggtagcaaatattctgtagttgtatcagtttcagaatgtcctcccattacgtatataacattgtttatggatgccactgctggattacatctaggtttcagaagactcggcatattaacccaagcagcatccccgtggaaccaacgctcaacagatgtgggatttggtagacctcctactacgtataatttattgttagcgggtatcccgctagcatacagtctggggctattcatcggaggaattggaatccaattgtttgatatataatttacagctatagcattgttatgtatttcattgttcatccatccaccgatgagatatactacttctccaacatgagtacttgtacacatatggaatatatctataatttgatccatgttcataggatactctatgaatggatacttgtatgatttgcgtggttgtttatcacaatgaaatattttggtacagtctagtatccattttacattatttatacctctgggagaaagataatttgacctgattacatttttgataaggagtagcagatttcctaatttatttcttcgcctcatataccacttaatgacaaaatcaactacataatcctcatctggaacatttagttcatcgctttctagaataagtttcatagatagataatcaaaattgtctatgatgtcatcttccagttccaaaaagtgtttggcaataaagtttttagtatgacataagagattggatagtccgtattctatacccatcatgtaacactcgacacaatattcctttctaaaatctcgtaagataaagtttatacaagtgtagatgataaattctacagaggttaatatagaagcacgtaataaattgacgacgttatgactatctatatatacctttccagtatatgagtaaataactatagaagttaaactgtgaatgtcaaggtctagacaaacccttgtaactggatctttatttttcgtgtatttttgacgtaaatgtgtgcgaaagtaaggagataactttttcaatatcgtagaattgactattatattgcctcctatggcatcaataattgttttgaatttcttagtcatagacaatgctaatatattcttacagtacacagtattgacaaatatcggcatttatgtttctttaaaagtcaacatctagagaaaaatgattatctttttgagacataactcccattttttggtattcacccacacgtttttcgaaaaaattagtttttccttccaatgatatattttccatgaaatcaaacggattggtaacattataaatttttttaaatcccaattcagaaatcaatctatccgcgacgaattctatatatgttttcatcatttcacaattcattcctataagtttaactggaagagccgcagtaagaaattcttgttcaatggatactgcatctgttataatagatctaacggtttcttcactcggtggatgcaataaatgtttaaacatcaaacatgcgaaatcgcagtgcagaccctcgtctctactaattagttcgttggaaaacgtgagtccgggcattaggccacgctttttaagccaaaatatggaagcgaatgatccagaaaagaaaattccttctactgcagcaaaggcaataagtctctctccataaccggcgctgtcatgtatccacttttgagcccaatcggccttcttttttacacaaggcatcgtttctatggcattaaagagatagtttttttcattactatctttaacataagtatcgatcaaaagactatacatttccgaatgaatgttttcaatggccatctgaaatccgtagaaacatctagcctcggtaatctgtacttctgtacaaaatcgttccgccaaattttcattcactattccgtcactggctgcaaaaaacgccaatacatgttttataaaatatttttcgtctggtgttagtttattccaatcattgatatctttagatatatctacttcttccactgtccaaaatgatgcctctgcctttttatacatgttccagatgtcatgatattggattgggaaaataacaaatctatttggatttggtgcaaggatgggttccataactaaattaacaataacaataaattttttttcagttatctatatgcctgtacttggattttttgtacatcgatatcgccgcaatcactacaataattacaagtattattgatagcattgttattagtactatcataattaaattatctacattcatgggtgctgaataatcgttattatcatcattatcattttgtaattgtgacatcatactagataaatcgtttgcgagattgttgtgggaagcgggcatggaggatgcattatcattattatttaacgccttccatttggattcacaaatgttacgcacattcaacattttatggaaactataattttgtgaaaacaaataacaagaaaactcgtcatcgttcaaatttttaacgatagtaaaccgattaaacgtcgagctaatttctaacgctagcgactctgttggatatgggtttccagatatatatcttttcagttcccctacgtatctataatcatctgtaggaaatggaagatatttccatttatctactgttcctaatatcatatgtggtggtgtagtagaaccattaagcgcgaaagatgttatttcgcatcgtattttaacttcgcaataatttctggttagataacgcactctaccagtcaagtcaatgatattagcctttacagatatattcatagtagtcgtaacgatgactccatcttttagatgcgatactcctttgtatgtaccagaatcttcgtacctcaaactcgatatatttaaacaagttaatgagatattaacgcgttttatgaatgatgatatataaccagaagttttatcctcggtggctagcgctataaccttatcattataataccaactagtgtgattaatatgtgacacgtcagtgtgggtacaaatatgtacattatcgtctacgtcgtattcgatacatccgcatacagccaacaaatataaaatgacaaatactctaacgccgttcgtacccatcttgatgcggtttaataaatgttttgatttcaatttattgtaaaaaaagattcggttttatactgttcgatattctcattgcttatattttcatctatcatctccacacagtcaaatccgtggttagcatgcacctcatcaaccggtaaaagactatcggactcttctatcattataactctagaatatttaatttggtcattattaatcaagtcaattatcttatttttaacaaacgtgagtattttactcattttttataaaaacttttagaaatatacagactctatcgtgtgtctatatcttctttttatatccaatgtatttatgtctgatttttcttcatttatcatatataatggtccaaattctacacgtgcttcggattcatccagatcattaaggttcttataattgtaacatccttctcttccctcttctacatcttccttcttattcttattcttagcgtcacagaatctaccacagcaggatcccatgacgagcgtcatattaaactaatccattttcaattataatatatgattagtaatgaccattaaaataaaaaatattcttcataaccggcaagaaagtgaaaagttcacattgaaactatgtcagtagtatacatcatgaaatgatgatatatatatactctattttggtggaggattatatgatataattcgtggataatcatttttaagacacatttctttattcgtaaatcttttcacgttaaatgagtgtccatattttgcaatttcttcatatgatggcggtgtacgtggacgaggctgctcctgttcttgttgtggtcgccgactgtcgtgtctgcgtttagatccctccattatcgcgattgcgtagatggagtactattttataccttgtaattaaatttttttattaattaaacgtataaaaacgttccgtatctgtatttaagagccagatttcgtctaatagaacaaatagctacagtaaaaataactagaataattgctacacccactagaaaccacggatcgtaatacggcaatcggttttcgataataggtggaacgtatattttatttaaggacttaacaattgtctgtaaaccacaatttgcttccgcggatcctgtattaactatctgtaaaagcatatgttgaccgggcggagccgaacattctccgatatctaatttctgtatatctataatattattaacctccgcatacgcattacagttcttttctagcttggataccgcactaggtacatcgtctagatctattcctatttcctcagcgatagctcttctatccttttccggaagcaatgaaatcacttcaataaatgattcaaccatgagtgtgaaactaagtcgagaattactcatgcatttgttagttattcggagcgcgcaatttttaaactgtcctataacctctcctatatgaatagcacaagtgacattagtagggatagaatgttgagctaatttttgtaaataactatctataaaaagattatacaaagttttaaactctttagtttccgccatttatccagtctgagaaaatgtctctcataataaatttttccaagaaactaattgggtgaagaatggaaacctttaatctatatttatcacagtctgttttggtacacatgatgaattcttccaatgccgtactaaattcgatatctttttcgatttctggatatgtttttaataaagtatgaacaaagaaatggaaatcgtaataccagttatgtttaactttgaaattgttttttattttcttgttaatgattccagccacttgggaaaagtcaaagtcgtttaatgccgatttaatacgttcattaaaaacaaactttttatcctttagatgaattattattggttcattggaatcaaaaagtaagatattatcgggtttaagatctgcgtgtaaaaagttgtcgcaacagggtagttcgtagattttaatgtataacagagccatctgtaaaaagataaactttatgtattgtaccaaagatttaaatcctaatttgatagctaactcggtatctactttatctgccgaatacagtgctaggggaaaaattataatgtttcctctttcatattcgtagttagttctcttttcatgttcgaaaaagtgaaacatgcggttaaaatagtttataacattaatattactgttaataactgccggataaaagtgggatagtaatttcacgaatttgatactgtcctttctctcgttaaacgcctttaaaaaaactttagaagaatatctcaatgagagttcctgaccatccatagtttgtatcaataatagcaacatatgaagaacacgtttatacagagtatgtaaaaatgttaatttatagtttaatcccatggcccacgcacacacgattaattttttttcatctccctttagattgttgtatagaaatttgggtactgtgaactccgccgtagtttccatgggactatataattttgtggcctcgaatacaaattttactacatagttatctatcttaaagactataccatatcctcctgtagatatgtgataaaaatcgtcgtttataggataaaatcgtttatccttttgttggaaaaaggatgaattaatgtaatcattctcttctatctttagtagtgtttccttattaaaattcttaaaataatttaacaatctaactgacggagcccaattttggtgtaaatctaattgggacattatattgttaaaatacaaacagtctcctaatataacagtatctgataatctatggggagacatccattgatattcaggggatgaatcattggcaacacccatttattgtacaaaaagccccaatttacaaacgaaagtccaggtttgatagagacaaacaattaactattttgtctctgtttttaacacctccacagtttttaatttctttagtaatgaaattattcacaatatcagtatcttctttatctaccagagattttactaacttgataaccttggctgtctcattcaatagggtagtaatatttgtatgtgtgatattgatatctttttgaattgtttcttttagaagtgattctttgatggtgccagcatacgaattacaataatgcagaaactcggttaacatgcaggaattatagtaagccaattccaattgttgcctgtgttgtattagagtgtcaatatgagcaatggtgtccttgcgtttctctgatagaatgcgagcagcgattttggcgttatcatttgacgatatttctggaatgacgaatcctgtttctactaactttttggtaggacaaagtgaaacaatcaagaagatagcttctcctcctatttgtggaagaaattgaactcctctagatgatctactgacgatagtatctccttgacagatattggaccgaattacagaagtacctggaatgtaaagccctgaaaccccctcattttttaagcagattgttgccgtaaatcctgcactatgcccaagatagagagctcctttggtgaatccatctctatgtttcagtttaaccaagaaacagtcagctggtctaaaatttccatctctatctaatacagcatctaacttgatgtcaggaactatgaccggtttaatgttatatgtaacattgagtaaatccttaagttcataatcatcactgtcatcagttatgtacgatccaaacaatgtttctaccggcatagtggatacgaagatgctatccatcagaatgtttccctgattagtattttctatatagctattcttctttaaacgattttccaaatcagtaactatgttcatttttttaggagtaggacgcctagccagtatggaagaggattttctagatcctctcttcaacatctttgatctcgatggaatgcaaaaccccatagtgaaacaaccaacgataaaaataatattgtttttcactttttataattttaccatctgactcatggattcattaatatctttataagagctactaacgtataattctttataactgaactgagatatatacaccggatctatggtttccataattgagtaaatgaatgctcggcaataactaatggcaaatgtatagaacaacgaaattatactagagttgttaaagttaatattttctatgagctgttccaataaattatttgttgtgactgcgttcaagtcataaatcatcttgatactatccagtaaaccgtttttaagttctggaatattatcatcccattgtaaagcccctaattcgactatcgaatatcctgctctgatagcagtttcaatatcgacggacgtcaatactgtaataaaggtggtagtattgtcatcatcgtgataaactacgggaatatggtcgttagtaggtacggtaactttacacaacgcgatatataactttccttttgtaccatttttaacgtagttgggacgtcctgcagggtattgttttgaagaaatgatatcgagaacagatttgatacgatatttgttggattcctgattattcactataatataatctagacagatagatgattcgataaatagagaaggtatatcgttggtaggataatacatccccattccagtattctcggatactctattgatgacactagttaagaacatgtcttctattctagaaaacgaaaacatcctacatggactcattaaaacttctaacgctcctgattgtgtctcgaatgcctcgtacaaggatttcaaggatgccatagattctttgaccaacgatttagaattgcgtttagcatctgatttttttattaaatcgaatggtcggctctctggtttgctaccccaatgataacaatagtcttgtaaagataaaccgcaagaaaatttatacgcatccatccaaataaccctagcaccatcggatgatattaatgtattattatagattttccatccacaattattgggccagtatactgttagcaacggtatatcgaatagattactcatgtaacctactagaatgatagttcgtgtactagtcataatatctttaatccaatctaaaaaatttaaaattagattttttacactgttaaagttaacaaaagtattacccgggtacgtggatatcatatatggcattggtccattatcagtaatagctccataaactgatacggcgatggtttttatatgtgtttgatctaacgaggaagaaattcgcgcccacaattcatctctagatatgtatttaatatcaaacggtaacacatcaatttcgggacgcgtatatgtttctaaatttttaatccaaatataatgatgacctatatgccctattatcatactgtcaactatagtacacctagggaacttacgatacatctgtttcctataatcgttaaattttacaaatctataacatgctaaaccttttgacgacagccattcattaatttctgatatggaatctgtattctcgataccgtatcgttctaaagccagtgctatatctccctgttcgtgggaacgctttcgtataatatcgatcaacggataatctgaagtttttggagaataatatgactcatgatctatttcgtccataaacaatctagacataggaattggaggcgatgatcttaattttgtgcaatgagtcgtcaatcctataacttctaatcttgtaatattcatcatcgacataatactatctatgttatcatcgtatattagtataccatgaccttcttcatttcgtgccaaaatgatatacagtcttaaatagttacgcaatatctcaatagtttcataattgttagctgttttcatcaaggtttgtatcctgtttaacatgatggcgttctataacgtctctattttctatttttaattttttaaatttttaacgatttactgtggctagatacccaatctctctcaaatatttttttagcctcgcttacaagctgtttatctatactattaaaactgacgaatccgtgattttggtaatgggttccgtcgaaatttgccgaagtgatatgaacatattcgtcgtcgactatcaacaattttgtattattctgaatagtgaaaaccttcacagatagatcattttgaacacacaacgcatctagacttttggcggttgccatagaatatacgtcgttcttatcccaattaccaactagaagtctgatcttaactcctctattaatggctgcttctataatggagttgtaaatgtcgggccaatagtagctattaccgtcgacacgtgtagtgggaactatggccaaatgttcaatatctatactagtcttagctgacctgagtttatcaataactacatcggtatctagatctctagaatatcccaataggtgttccggagaatcagtaaagaacactccacctataggattcttaatatgatacgcagtgctaactggcaaacaacaagccgcagagcataaattcaaccatgaattttttgcgctattaaaggctttaaaagtatcaaatcttctacgaagatctgtggccagcgggggataatcagaatatacacctaacgttttaatcgtatgtatagatcctccagtaaatgacgcgtttcctacataacatctttcatcatctgacacccaaaaacaaccgagtagtagtcccacattattttttttatctatattaacggttataaaatttatatccgggcagtgactttgtagctctcccagatttcttttccctcgttcatctagcaaaactattattttaatccctttttcagatgcctcttttagtttatcaaaaataagcgctcccctagtcgtactcagaggattacaacaaaaagatgctatgtatatatatttcttagctagagtgataatttcgttaaaacattcaaatgttgttaaatgatcggatctaaaatccatattttctggtagtgtttctaccagcctacattttgctcccgcaggtaccgatgcaaatggccacatttagttaacataaaaacttatacatcctgttctatcaacgattctagaatatcatcggctatatcgctaaaattttcatcaaagtcgacatcacaacctaactcagtcaatatattaagaagttccatgatgtcatcttcgtctatttctatatccgtatccattgtagattgttgaccgattatcgagtttaaatcattactaatactcaatccttcagaatacaatctgtgtttcattgtaaatttataggcggtgtatttaagttggtagattttcaattatgtattaatatagcaacagtagttcttgctcctccttgattctagcatcctcttcattattttcttctacgtacataaacatgtccaatacgttagacaacacaccgacgatggcggccgctacagacacgaatatgactaaaccgatgaccatttaaaaacccctctctagctttcacttaaactgtatcgatcattcttttagcacatgtataatataaaaacattattctatttcgaatttaggcttccaaaaatttttcatccgtaaaccgataataatatatatagacttgttaatagtcggaataaatagattaatgcttaaactatcatcatctccacgattagagatacaatatttacattctttttgctgtttcgaaactttatcaatacacgttaatacaaacccaggaaggagatattgaaactgaggctgttgaaaatgaaacggtgaatacaataattcagataatgtaaaatcatgattccgtattctgatgatattagaactgctaatggatgtcgatggtatgtatctaggagtatctattttaacaaagcatcgatttgctaatatacaattatccttttgattaattgttattttattcatattcttaaaaggtttcatatttatcaattcttctacattaaaaatttccatttttaatttatgtagccccgcaatactcctcattacgtttcattttttgtctataatatccattttgttcatctcggtacatagattatccaattgagaagcgcatttagtagttttgtacattttaagtttattgacgaatcgtcgaaaactagttatagttaacattttattatttgataccctgatattaatacccctgccgttactattatttataactgatgtaatccacgtaacattggaattaactatcgatagtaatgcatcgacgcttccaaaattgtctattataaactcaccgataatttttttattgcatgttttcatattcattaggattatcaaatctttaatcttattacgattgtatgcgttgatattacaagacgtcattctaaaagacggaggatctccatcaaatgccagacaatcacgtacaaagtacatggaaataggttttgttctattgcgcatcatagatttatatagaacacccgtagaaatactaatttgttttactctataaaatactaatgcatctatttcatcgttttgtataacgtctttccaagtgtcaaattccaaatttttttcattgatagtaccaaattcttctatctctttaactacttgcatagataggtaattacagtgatgcctacatgccgttttttgaaactgaatagatgcgtctagaagcgatgctacgctagtcacaatcaccactttcatatttagaatatatatatgtaaaaatatagtagaatttcattttgtttttttctatgctataaatgaattctcattttgcatctgctcatactccgttttatattaataccaaagaaggaagatatctggttctaaaagccgttaaagtatgcgatgttagaactgtagaatgcgaaggaagtaaagcttcctgcgtactcaaagtagataaaccctcatcgcccgcgtgtgagagaagaccttcgtccccgtccagatgcgagagaatgaataaccctggaaaacaagttccgtttatgaggacggacatgctacaaaatatgttcgcggctaatcgcgataatgtagcttctagacttttgtcctaaaatactattatatccttttcgatattaataaatccgtgtcgtccaggttttttatctctttcagtatgtgaatagataggtattttatctctattcatcatcgaatttaagagatccgataaacattgtttgtattctccagatgtcagcatctgatacaacaatatatgtgcacataaacctctggcacttatttcatgtaccttccccttatcactaaggagaatagtatttgagaaatatgtatacatgatattatcatgaattagatatacagaatttgtaacactctcgaaatcacacgatgtgtcggcgttaagatctaatatatcactcgataacacattttcatctagatacactagacattttttaaagctaaaatagtctttagtagtaacagtaactatgcgattattttcatcgatgatacatttcatcggcatattattacgcttaccatcaaagactataccatgtgtatatctaacgtattctagcatggttgccatacgcgcattaaacttttcaggatctttggatagatcttccaatctatctatttgagaaaacatttttatcatgttcaatagttgaaacgtcggatccactatatagatattatctataaagattttaggaactacgttcatggtatcctggcgaatattaaaactatcaatgatatgattatcgttttcatcttttatcaccatatagtttctaagatatgggattttacttaatataatattatttcccgtgataaattttattagaaaggccaaatctataagaaaagtcctagaattagtctgaagaatatctatatcgccgtatagtatatttggattaattagatatagagaatatgatccgtaacatatacaacttttattatggcgtctaagatattcttccatcaacttattaacatttttgactagggaagatacattatgacgtcccattacttttgccttgtctattactgcgacgttcatagaatttagcatatctcttgccaattcttccattgatgttacattataagaaattttagatgaaattacatttggagctttaatagtaagaactcctaatatgtccgtgtatgtggtcactaatacagattgtagttctataatcgtaaataatttacctatattatatgtttgagtctgtttagaaaagtagctaagtatacgatcttttatttctgatgcagatgtattaacatcggaaaaaaatctttttttattcttttttactaaagatacaaatatgtctttgttaaaaacagttattttctgaatatttctagcttgtaattttaacatatgatattcgttcacactaggtactctgcctaaataggtttctataatctttaatgtaatattaggaaaagtattctgatcaggattcctattcattttgaggatttaaaactctgattattgtctaatatggtctctacgcaaactttttcacagagcgatagagtttttgataactcgtttttcttaagaaatataaaactactgtctccagagctcgctctatcttttattttatctaattcgatacaaactcctgatactggttcagaaagtaattcattaattttcagtcctttatagaagatatttaatatagataatacaaaatcttcagtttttgatatcgatctgattgatcctagaactagatatattaataacgtgctcattaggcagtttatggcagcttgataattagatatagtatattccagttcatatttattagataccgcattgcccagattttgatattctatgaattcctctgaaaataaatccaaaataactagacattctattttttgtggattagtgtactctcttccctctatcatgttcactactggtgtccacgatgataaatatctagagggaatataatatagtccataggatgccaatctagcaatgtcgaataactgtaattttattcttcgctcttcattatgaattgattcttgaggtataaacctaacacaaattatattattagacttttcgtatgtaatgtctttcatgttataagtttttaatcctggaatagaatctattttaatgaggcttttaaacgcagagttctccaacgagtcaaagcataatactctgttgtttttcttatatacgatgttacgattttcttctttgaatggaataggtttttgaattagtttataattacaacataatagataaggaagtgtgcaaatagtacgcggaaaaaacataatagctcccctgttttcatccatggttttaagtaaatgatcactggcttctttagtcaatggatattcgaacattaaccgtttcatcatcattggacagaatccatatttcttaatgtaaagagtgatcaaatcattgtgtttattgtaccatcttgttgtaaatgtgtattcggttatcggatctgctcctttttctattaaagtatcgatgtcaatctcgtctaagaattcaactatatcgacatatttcatttgtatacacataaccattactaacgtagaatgtataggaagagatgtaacgggaacagggtttgttgattcgcaaactattctaatacataattcttctgttaatacgtcttgcacgtaatctattatagatgccaagatatctatataattattttgtaagatgatgttaactatgtgatctatataagtagtgtaataattcatgtattttgatatatgttccaactctgtctttgtgatgtctagtttcgtaatatctatagcatcctcaaaaaatatattcgcatatattcccaagtcttcagttctatcttctaaaaaatcttcaacgtatggaatataataatctattttacctcttctgatatcattaatgatatagtttttgacactatcttctgtcaattgattcttattcactatatctaagaaacggatagcgtccctaggacgaactactgccattaatatctctattatagcttctggacataattcatctattataccagaattaatgggaactattccgtatctatctaacatagttttaagaaagtcagaatctaagacttgatgttcatatattggttcatacatgaaatgatctctattgatgatagtgactatttcattctctgaaaattggtaactcattctatatatgctttccttgttgatgaaggatagaatatactcaatagaatttgtaccaacaaactgttctcttatgaatcgtatatcatcatctgaaataatcatgtaaggcatacatttaacaattagagacttgtctcctgttatcaatatactattcttgtgataatttatgtgtgaggcaaatttgtccacgttctttaattttgttatagtagatatcaaatccaatggagctacagttcttggcttaaacagatatagtttttctggaacaaattctacaacattattataaaggactttgggtagataagtgggatgaaatcctattttaattaatgcgatagccttgtcctcgtgcagatatccaaacgcttttgtgatagtatggcattcattgtctagaaacgctctacgaatatctgtgacagatatcatctttagagaatatactagtcgcgttaatagtactacaatttgtattttttaatctatctcaataaaaaaattaatatgtatgattcaatgtataactaaactactaactgttattgataactagaatcagaatctaatgatgacgtaaccaagaagtttatctactgccaatttagctgcattatttttagcatctcgtttagattttccatcggccttatcgaatactcttccgtcgatgtctacacaggcataaaatgtaggagagttactaggcccaactgattcaatacgaaaagaccaatctctcctagtaatttggcagtactcattaataacggtgacagggttagcatctttccaatcaataatttttttagccggaataacatcatcaaaagacttatgatcctctctcattgatttttcgcgggatacatcatctattatgacgtcagccatagcatcagcatccggcttatccgcctccgttgtcataaaccaacgaggaggaatatcgtcggagctgtacaccatagcactacgttgaagatcgtacagagctttattaacttctcgcttctccatattaagttgtctagttagttgtgcagcagtagctccttcgattccaatgtttttaatagccgcacacacaatctctgcgtcagaacgctcgtcaatatagatcttagacatttttagagagaactaacgcaaccagcaataaaactgaacctactttatcatttttttattcatcatcctctggtggttcgtcgttcctatcaaatgtagctctgattaacccgtcatctataggtgatgctggttctggagattctggaggagatggattattatctggaagaatctctgttatttccttgttttcatgtatcgattgcgttgtaacattaagattgcgaaatgctctaaatttgggaggcttaaagtgttgtttgcaatctctacacgcgtgtctaactagtggaggttcgtcagctgctctagtttgaatcatcatcggcgtagtattcctacttttacagttaggacacggtgtattgtatttctcgtcgagaacgttaaaataatcgttgtaactcacatcctttattttatctatattgtattctactcctttcttaatgcattttataccgaataagagatagcgaaggaattctttttcggtgccgctagtacccttaatcatatcacatagtgttttatattccaaatttgtggcaatagacggtttatttctatacgatagtttgtttctggaatcctttgagtattctataccaatattattctttgattcgaatttagtttcttcgatattagattttgtattacctatattcttgatgtagtactttgatgatttttccatggcccattctattaagtcttccaagttggcatcatccacatattgtgatagtaattctcggatatcagtagcggctaccgccattgatgtttgttcattggatgagtaactactaatgtatacattttccatttataacacttatgtattaactttgttcatttatattttttcattattatgttgatattaacaaaagtgaatatatatatgttaataattgtattgtggttatacggctacaattttataatgagtgaaagtcagtgtccgatgatcaatgacgatagctttactctgaaaagaaagtatcaaatcgatagtgcggagtcaacaataaaaatggataagaagaggataaagtttcagaatagagccaaaatggtaaaagaaataaatcagacaataagagcagcacaaactcattacgagacattgaaactaggatacataaaatttaagagaatgattatgactactactctagaagatatagcaccatctattccaaataatcagaaaacttataaactattctcggacatttcagccatcggcaaagcatcacagaatccgagtaagatggtatatgctctgctgctttacatgtttcccaatttgtttggagatgatcatagattcattcgttatagaatgcatccaatgagtaaaatcaaacacaagatcttctctcctttcaaacttaatcttattagaatattagtggaagaaagattctataataatgaatgcagatctaataaatggagaataattggaacacaagttgataaaatgttgatagctgaatctgataaatatacaatagatgcaaggtataacctaaaacccatgtatagaatcaagggagaatctgaagaagataccctctttatcaaacagatggtagaacaatgtgtgacatcccaggaattggtggaaaaagtgttgaagatactgtttagagatttgttcaagagtggagaatacaaagcgtacagatacgatgatgatgtagaaaatggatttattggattggatacactaaaattaaacattgttcatgatatagttgaaccatgtatgcctgttcgtaggccagtggctaagatactgtgtaaagaaatggtaaataaatactttgagaatccgctacatattattggtaaaaatcttcaagagtgcattgactttgttagtgaataggcatttcatctttctccaatactaattcaaattgttaaattaataatggatagtataaatagttattagttataagatagtaaaaataattattagaataagagtgtagtatcatagataactctcttctataaaaatggattttattcgtagaaagtatcttatatacacagtagaaaataatatagattttttaaaggatgatacattaagtaaagtaaacaattttaccctcaatcatgtactagctctcaagtatctagttagcaattttcctcaacacgttattactaaggatgtattagctaataccaatttttttgttttcatacatatggtacgatgttgtaaagtgtacgaagcggttttacgacacgcatttgatgcacccacgttgtacgttaaagcattgactaagaattatttatcgtttagtaacgcaatacaatcgtacaaggaaaccgtgcataaactaacacaagatgaaaaatttttagaggttgccgaatacatggacgaattaggagaacttataggcgtaaattatgacttagttcttaatccattatttcacggaggggaacccatcaaagatatggaaatcatttttttaaaactgtttaagaaaacagacttcaaagttgttaaaaaattaagtgttataagattacttatttgggcatacctaagcaagaaagatacaggcatagagtttgcggataatgatagacaaaatatatacactctatttcaacaaactggtagaatcgtccatagcaatctaacagaaacgtttagagattatatctttcccggagataagactagctattgggtgtggttaaacgaaagtatagctaatgatgcggatatcgttcttaatagacacgccattaccatgtatgataaaattcttagttatatatactctgagataaaacaaggacgcgttaataaaaacatgcttaagttagtttatatctttgagcctgaaaaagatatcagagaacttctgctagaaatcatatatgatattcctggagatatcctatctattattgatgcaaaaaacgacgattggaaaaaatattttattagtttttataaagctaattttattaacggtaatacatttattagtgatagaacgtttaacgaggacttattcagagttgttgttcaaatagatcccgaatatttcgataatgaacgaattatgtctttattctctacgagtgctgcggacattaaacgatttgatgagttagatattaataacagttatatatctaatataatttatgaggtgaacgatatcacattagatacaatggatgatatgaagaagtgtcaaatctttaacgaggatacgtcgtattatgttaaggaatacaatacatacctgtttttgcacgagtcggatcccatggtcatagagaacggaatactaaagaaactgtcatctataaaatccaagagtagacggctgaacttgtttagcaaaaacattttaaaatattatttagacggacaattggctcgtctaggtcttgtgttagatgattataaaggagacttgttagttaaaatgataaaccatcttaagtctgtggaggatgtatccgcattcgttcgattttctacagataaaaaccctagtattcttccatcgctaatcaaaactattttagctagttataatatttccatcatcgtcttatttcaaaggtttttgagagataatctatatcatgtagaagaattcttggataaaagcatccatctaaccaagacggataagaaatatatacttcaattgataagacacggtagatcatagaacagaccaaatatattattaataatttgtatatacatagatataattatcacacatttttgataaatgggaactgctgcaacaattcagactcccaccaaattaatgaataaagaaaatgcagaaatgattttggaaaaaattgttgatcatatagttatgtatattagtgacgaatcaagtgattcagaaaataatcctgaatatattgattttcgtaacagatacgaagactatagatctctcattataaaaagtgatcacgagtttgtaaagctatgtaaaaatcatgcggagaaaagttctccagaaacgcaacaaatgattatcaaacacatatacgaacaatatcttattccagtatctgaagtactattaaaacctataatgtccatgggtgacataattacatataacggatgtaaagacaatgaatggatgctagaacaactctctaccctaaactttaacaatctccgcacatggaactcatgtagcataggcaatgtaacgcgtctgttttatacattttttagttatctgatgaaagataaactaaatatataagtataatcccattctaatactttaacctgatgtattagcatcttattagaatattaacctaactaaaagacataacataaaaactcattacatagttgataaaaagcggtaggatataaatattatggctgccaccgttccgcgttttgacgacgtgtacaaaaatgcacaaagaagaattctagatcaagaaacattttttagtagaggtctaagtagaccgttaatgaaaaacacatatctatttgataattacgcgtatggatggataccagaaactgcaatttggagtagtagatacgcaaacctagatgctagtgactattatcccatttcgttgggattacttaaaaagttcgagtttctcatgtctctatataaaggtcctattcccgtatatgaagaaaaagtaaatactgaattcatagccaatggatcgttctctggtagatacgtatcatatcttcgaaagttttctgcccttccaacaaacgagtttattagttttttgttactgacttccattccaatctataatatcttgttctggtttaaaaacacacagtttgatattactaaacacacattattcagatacgtctatacagataatgccaaacacctggcgttggctaggtatatgcatcaaacaggagactataagcctttgtttagtcgtctcaaagagaattatatatttaccggtcccgttccaataagtatcaaagatatagatcaccctaatcttagtagagcaagaagtccatccgattatgagacattagctaatattagtactatattgtactttaccaagtatgatccggtattaatgtttttattgttttacgtacctgggtattcaattactacaaaaattactccagccgtagaatatctaatggataaactgaatctaacaaagagcgacgtacaactgttgtaaattattttatgcttcgtaaaatgtaggttttgaaccaaacattctttcaaagaatgagatgcataaaactttattatccaatagattgactatttcggacgtcaatcgtttaaagtaaacttcgtaaaatattctttgatcactgccgagtttaaaacttctatcgataattgtctcatatgttttaatatttacaagttttttggtccatggtacattagccggacaaatatatgcaaaataatatcgttctccaagttctatagtttctggattatttttattatattcagtaactaaatacatattagggttatctgcggatttataatttgagtgatgcattctactcaacataaataattctagaggagacgatctactatcaaattcggatcgtaaatctgtttctaaagaacggagaatatctatacatacctgattagaattcatccgtccttcagacaacatctcagacagtctggttttgtacatcttaatcatattcttatgaaacttggaaacatctcttctagtttcactagtacctttattaattctctcaggtacagattttgaattcgacgatgctgagtatttcatcgttgtatatttcttcttcgattgcataatcagattcttatataccgcctcaaactctattttaaaattattaaacaatactctattattaatcagtcgttctaactctttcgctatttctatagacttatctacatcttgactgtctatctctgtaaacacggagtcggtatctccatacacgctacgaaaacgaaatctgtaatctataggcaacgatgttttcacaatcggattaatatctctatcgtccatataaaatggattacttaatggattggcaaaccgtaacataccgttagataactctgctccatttagtaccgattctagatacaagatcattctacgtcctatggatgtgcaactcttagccgaagcgtatgagtatagagcactatttctaaatcccatcagaccatatactgagttggctactatcttgtacgtatattgcatggaatcatagatggccttttcagttgaactggtagcctgttttagcatctttttatatctggctctctctgccaaaaatgttcttaatagtctaggaatggttccttctatcgatctatcgaaaattgctatttcagagatgaggttcggtagtctaggttcacaatgaaccgtaatatatctaggaggtggatatttctgaagcaatagctgattatttatttcttcttccaatctattggtactaacaacgacaccgactaatgtttccggagatagatttccaaagatacacacattaggatacagactgttataatcaaagattaatacattattactaaacattttttgttttggagcaaataccttaccgccttcataaggaaacttttgttttgtttctgatctaactaagatagttttagtttccaacaatagctttaacagtggacccttgatgactgtactcgctctatattcgaataccatggattgaggaagcacatatgttgacgcacccgcgtctgtttttgtttctactccataatactcccacaaatactgacacaaacaagcatcatgaatacagtatctagccatatctaaagctatgtttagattataatccttatacatctgagctaaatcaacgtcatcctttccgaaagataatttatatgtatcattaggtaaagtaggacataatagtacgactttaaatccattttcccaaatatctttacgaattactttacatataatatcctcatcaacagtcacataattacctgtggttaaaacctttgcaaatgcagcggctttgcctttcgcgtctgtagtatcgtcaccgatgaacgtcatttctctaactcctctatttaatactttacccatgcaactgaacgcgttcttggatatagaatccaatttgtacgaatccaatttttcaaatttttgaatgaatgaatatagatcgaaaaatatagttccattattgttattaacgtgaaacgtagtattggccatgccgcctactcccttatgactagactgatttctctcataaatacagagatgtacagcttcctttttgtccggagatctaaagataattttctctcctgttaataactctagacgattagtaatatatctcagatcaaagttatgtccgttaaaggtaacgacgtagtcgaacgttagttccaacaattgtttagctattcgtaacaaaactatttcagaacatagaactagttctcgttcgtaatccatttccattagtgactgtatcctcaaacatcctctatcgacggcttcttgtatttcctgttccgttaacatctcttcattaatgagcgtaaacaataatcgtttaccacttaaatcgatataacagtaacttgtatgcgagattgggttaataaatacagaaggaaacttcttatcgaagtgacactctatatctagaaataagtacgatcttgggatatcgaatctaggtatttttttagcgaaacagttacgtggatcgtcacaatgataacatccattgttaatctttgtcaaatattgctcgtccaacgagtaacatccgtctggagatatcccgttagaaatataaaaccaactaatattgagaaattcatccatggtggcattttgtatgctgcgtttctttggctcttctatcaaccacatatctgcgacggagcattttctatctttaatatctagattataacttattgtctcgtcaatgtctatagttctcatctttcccaacggcctcgcattaaatggaggaggagacaatgactgatatatttcgtccgtcactacgtaataaaagtaatgaggaaatcgtataaatacggtctcgccatttcgacatctggatttcagatataaaaatctgttttcaccgtgactttcaaaccaattaatgcaccgaacatccatttatagaatttagaaatatattttcatttaaatgaatcccaaacattggggaagagccgtatggaccattatttttatagtactttcgcaagcgggtttagacggcaacatagaagcgtgtaaacgaaaactatatactatagttagcactcttccatgtcctgcatgtagacggcacgcgactatcgctatagaggacaataatgtcatgtctagcgatgatctgaattatatttattattttttcatcagattatttaacaatttggcatctgatcccaaatacgcgatcgatgtgacaaaggttaaccctttataaacttaacccattataaaacttatgattagtcacaactgaaataaccgcgtgattattttttggtataattctacacggcatggtttctgtgactatgaattcaacccccgttacattagtgaaatctttaacaaacagcaagggttcgtcaaagacataaaactcattgtttacaatcgaaatagaccccctatcacacttaaaataaaaaatatccttatcctttaccaccaaataaaattctgattggtcaatgtgaatgtattcacttaacagttccacaaatttatttattaactccgaggcacatacatcgtcggtattttttatggcaaactttactcttccagcatccgtttctaaaaaaatattaacgagttccatttatatcatccaatattattgaaatgacgttgatggacagatgatacaaataagaaggtacggtacctttgtccaccatctcctccaattcatgctctattttgtcattaactttaatgtatgaaaacagtacgccacatgcttccatgacagtgtgtaacactttggatacaaaatgtttgacattagtataattgtccaagactgtcaatctataatagatagtagctataatatattctatgatggtattgaagaagatgacaaccttggcatattgatcatttaacacagacatggtatcaacagatagcttgaatgaaagagaatcagtaattggaataagcgtcttctcgatagagtgtccgtataccaacatgtctgatattttgatgtattccattaaattatttagttttttctttttattctcgttaaacagcatttctgtcaacggaccccaacatcgttgaccgattaagttttgattgatttttccgtgtaaggcgtatctagtcagatcgtatagcctatccaataatccatcgtctgtgtgtagatcacatcgtacactttttaattctctatagaagagcgacagacatctggagcaattacagacagcaatttctttattctctacagatgtaagatacttgaagacattcctatgatgatgcagaattttggataacacggtattgatggtatctgttaccataattcctttgatggctgatagtgtcagagcacaagatttccaatctttgacaatttttagcaccattatctttgttttgatatctatatcagacagcatggtgcgtctgacaacacagggattaagacggaaagatgaaatgattctctcaacatcttcaatagataccttgctattttttctggcattatctatatgtgcgagaatatcctctagagaatcagtatcctttttgatgatagtggatctcaatgacatgggacgtttaaaccttcttattctatcaccagattgcatggtgatttgtcttctttcttttatcataatgtaatctctaaattcatcggcaaattgtctatatctaaaatcataatatgagatgtttacctctacaaatatctgttcgtccaatgttagagtatttacatcagttttgtattccaaattaaacatggcaacggatttaattttatattcctctattaagtcctcgtcgataataacagaatgtagataatcatttaatccgtcgtacatggttggaagatgcttgttgacaaaatctttaattgtcttgatgaaggtgggactatatctaacatcttgattaataaaatttataacattgtccataggatactttgtaactagttttatacacatctcttcatcggtaagtttagacagaatatcgtgaacaggtggtatattatattcatcagatatacgaagaacaatgtccaaatctatattgtttaatatattatatagatgtagcgtagctcctacaggaatatctttaactaagtcaatgatttcatcaaccgttagatctattttaaagttaatcatataggcattgatttttaaaaggtatgtagccttgactacattctcattaattaaccattccaagtcattgtgtgtaagaagattatattctatcataagcttgactacatttggtcccgataccattaaagaattcttatgatataaggaaacagattttaggtactcatctactctacaagaattttggagagccttaacgatatcagtgacgtttattatttcaggaggaaagaatctaacattgagaatatcggaattaatagcttccagatacagtgattttggcaatagtccgtgtaatccataatccagtaacacgagctggtgcttgctagacaccttttcaatgtttaatttttttgaaataagctttgataaagccttcctcgcaaattccggatacatgaacatgtcggcgacatgattaagtattgttttttcattatttttatattttctcaacaagttctcaataccccaatagatgatagaatatcacccaatgcgtccatgttgtctatttccaacaggtcgctatatccaccaatagaagtttttccaaaaaagattctaggaacagttctaccaccagtaatttgttcaaaataatcccgcaattcattttcgggtttaaattctttaatatcgacaatttcatacgctcctcttttgaaactaaacttatttagaatatccagtgcatttctacaaaaaggacatgtatacttgacaaaaattgtcactttgttattggccaacctttgttgtacaaattcctcggccattttaatatttaagtgatataaaactatctcgacttatttaactctttagtcgagatatatggacgcagatagctatatgatagccaactacagaaggcaaacgctataaaaaacataattacgacgagcatatttataaatatttttattcagcattacttgatatagtaatattaggcacagtcaaacattcaaccactctcgatacattaactctctcattttctttaacaaattctgcaatatcttcgtaaaaagattcttgaaactttttagaatatctatcgactctagatgaaatagcgttcgtcaacatactatgttttgtatacataaaggcgcccattttaacagtttctagtgacaaaatgctagcgatcctaggatcctttagaatcacatagattgacgattcgtctctcttagtaactctagtaaaataatcatacaatctagtacgcgaaataatattatccttgacttgaggagatctaaacaatctagttttgagaacatcgataagttcatcgggaatgacatacatactatctttaatagaactcttttcatccagttgaatggattcgtccttaaccaactgattaatgagatcttctattttatcattttccagatgatatgtatgtccattaaagttaaattgtgtagcgcttctttttagtctagcagccaatactttaacatcactaatatcgatatacaaaggagatgatttatctatggcattaagaattcgtttttcgacatccgtcaaaaccaattcctttttgcctgtatcatccagttttccatcctttgtaaagaaattattttctactagactattaataagactgataaggattcctccataattgcacaatccaaactttttaacaaaactagactttacgagatctacaggaatgcgtacttcaggttttttagcttgtgattttttcttttgcggacattttctagtaaccaactcatctaccatttcattgattttagcagtgaaataagctttcaatgcacgggcactgatactattgaaaacgagttgatcttcaaattccgccatttaagttcaccaaacaacttttaaatacaaatatatcaatagtagtagaataagaactataaaaaaaataataattaaccaaccccaacaaccggtattattagttgatgtggtagttttctcatcacttagaacagatttaacaatttctataaagtctgtcaaatcatcttccggagaccccataaatacaccaaatatagcggcgtacaacttatccatttatacattgaatattggcttttctttatcgctatcttcatcatattcatcatcaatatcaacaagtcccagattacgagccagatcttcttctacattttcagtcattgatacacgttcactatctccagagagtccgataacgttagccaccacttctctatcaatgattagtttcttgagcgcgaaagtaatttttgtttccgttccggatctatagaagacgataggtgtgataattgccttggccaattgtctttctcttttactgagtgattctagttcaccttctatagatctgagaatggatgattctccagtcgaaacatattctaccatggatccgtttaatttgttgatgaagatggattcatccttaaatgttttctctgtaatagtttccaccgaaagactatgcaaagaatttggaatgcgttccttgtgcttaatgtttccatagacggcttctagaagttgatacaacataggactagccgcggtaacttttatttttagaaagtatccatcgcttctatcttgtttagatttatttttataaagtttagtctctccttccaacataataaaagtggaagtcatttgactagataaactatcagtaagttttatagagatagacgaacaattagcgtattgagaagcatttagtgtaacgtattcgatacattttgcattagatttactaatcgattttgcatactctataacacccgcacaagtctgtagagaatcgctagatgcagtaggtcttggtgaagtttcaactctcttcttgattaccttactcatgattaaacctaaataattgtactttgtaatataatgatatatattttcactttatctcatttgagaataaaaatgtttttgtttaaccactgcatgatgtacagatttcggaatcgcaaaccaccagtggttttattttatccttgtccaatgtgaattgaatgggagcggatgcgggtttcgtacgtagatagtacattcccgtttttagaccgagactccatccgtaaaaatgcatactcgttagtttggaataactcggatctgctatatggatattcatagattgactttgatcgatgaaggctcccctgtctgcagccatttttatgatcgtcttttgtggaatttcccaaatagttttataaactcgcttaatatcttctggaaggtttgtattctgaatggatccaccatctgccataatcctattcttgatctcatcattccataattttctctcggttaaaactctaaggagatgcggattaactacttgaaattctccagacaatactctccgagtgtaaatattactggtatacggttccaccgactcattatttcccaaaatttgagcagttgatgcagtcggcataggtgccaccaataaactatttctaagaccgtatgttctgattttatcttttagaggttcccaattccaaagatccgacggtacaacattccaaagatcatattgtagaataccgttactggcgtacgatcctacatatgtatcgtatggtccttccttctcagctagttcacaactcgcctctaatgcaccgtaataaatggtttcgaagatcttcttatttagatcttgtgcttccaggctatcaaatggataatttaagagaataaacgcgtccgctaatccttgaacaccaataccgataggtctatgtctcttattagagatttcagcttctggaataggataataattaatatctataattttattgagatttctgacaattactttgaccacatccttcagtttgagaaaatcaaatcgcccatctattacaaacatgttcaaggcaacagatgccagattacaaacggctacctcattagcatccgcatattgtattatctcagtgcaaagattactacacttgatagttcctaaattttgttgattactctttttgttacacgcatccttataaagaatgaatggagtaccagtttcaatctgagattctataatcgctttccagacgactcgagcctttattatagatttgtatctcctttctctttcgtatagtgtatacaatcgttcgaactcgtctccccaaacattgtccaatccaggacattcatccggacacatcaacgaccactctccgtcatccttcactcgtttcataaagagatcaggaatccaaagagctataaatagatctctggttctatgttcctcgtttcctgtattctttttaagatcgaggaacgccataatatcagaatgccacggttccaagtatatggccataactccaggccgtttgtttcctccctgatctatgtatctagcggtgttattataaactctcaacattggaataataccgtttgatataccattggtaccggagatatagcttccactggcacgaatattactaattgatagacctattccccctgccattttagagattaatgcgcatcgttttaacgtgtcatagataccctctatgctatcatcgatcatgttaagtagaaaacagctagacatttggtgacgactagttcccgcattaaataaggtaggagaagcgtgcgtaaaccatttttcagaaagtagattgtacgtctcaatagctgagtctatatcccattgatgaattcctactgcgacacgcattaacatgtgctgaggtctttcaacgatcttgttgtttattttcaacaagtaggatttttccaaagttttaaaaccaaaatagttgtatgaaaagtctcgttcgtaaataataaccgagttgagtttatccttatatttgttaactatatccatggtgatacttgaaataatcggagaatgtttcccatttttaggattaacatagttgaataaatcctccatcacttcactaaatagtttttttgtttccttgtgtagatttgatacggctattctggcggctagaatggcataatccggatgttgtgtagtacaagtggctgctatttcggctgccagagtgtccaattctaccgttgttactccattatatattccttgaataaccttcatagctattttaataggatctatatgatccgtgtttaagccataacataattttctaatacgagacgtgattttatcaaacatgacattttccttgtatccatttcgtttaatgacaaacatttttgttggtgtaataaaaaaattatttaacttttcattaatagggatttgacgtatgtagcgtacaaaatgattgttcctggtatatagataaagagtcctatatatttgaaaatcgttacggctcgattaaactttaatgattgcatagtgaatatatcattaggatttaactccttgactatcatggcggcgccagaaattaccatcaaaagcattaatacagttataccgatcgcagttagaacggttatagcatccaccatttatatctaaaaattagatcaaagaatatgtgacaaagtcctagttgtatactgagaattgacgaaacaatgtttcttacatatttttttcttattagtaaccgacttaatagtaggaactggaaaactagacttgattattctataagtatagatacccttccaaataatattctctttgataaaagttccagaaaatgtagaattttttaaaaagttatcttttgctattaccaagattgtgtttagacgcttattattaatatgagtgatgaaatccacaccgcctctagatatcgcctttatttccacattagatggtaaatccaatagtgaaactatctttttaggaatgtatggactcgcgtttagaggagtaaacgtcttaggcgtcggaaaggatgattcatcaaacgaataaacaatttcacaaatggatgttaatgtattagtaggaaattttttgacgctattggaattgaagattctaatggatgatgttctacctatttcatccgataacatgttaatttccgacaccaacggttttaatatttcgatgatatacggtagtctctctttcggacttatatagcttattccacaatacgagtcattatatactccaaaaaacaaaataactagtataaaatctgtatcgaatgggaaaaacgaaattatcgacataggtatagaatccggaacattgaacgtattaatacttaattctttttctgtggtaagtaccgataggttattgacattgtatggttttaaatattctataacttgagacttgatagatattagtgatgaattgaaaattatttttatcaccacgtgtgtttcaggatcatcgtcgacgcccgtcaaccaaccgaacggagtaaaataaatatcattaatatatgctctagatattagtatttttatcaatcctttgattatcatcttctcgtaggcgaatgattccatgatcaagagtgatttaagaacatcctccggagtattaatgggcttagtaaacagtccatcgttgcaataataaaagttatccaagttaaaggatattatgcattcgtttaaagatatcacctcatctgacggagacaattttttggtaggttttagagactttgaagctacttgtttaacaaagttattcatcgtcgtctactattctatttaattttgtagttaatttatcacatatcacattaattgactttttggtccacttttccatacgtttatattcttttaatcctgcgttatccgtttccgttatatccagggatagatcttgcaagttaaatagaatgctcttaaataatgtcattttcttatccgctaaaaatttaaagaatgtataaacctttttcagagatttgaaactcttaggtggtgtcctagtacacaatatcataaacaaactaataaacattccacattcagattccaacagctgattaacttccacattaatacagcctattttcgctccaaatgtacattcgaaaaatctgaataaaacatcgatgtcacaatttgtattatccaatacagaatgtttgtgattcgtgttaaaaccatcggagaaggaatagaaataaaaattattatagtggtggaattcagttggaatattgcctccggagtcataaaaggatactaaacattgttttttatcataaattacacatttccaatgagacaaataacaaaatccaaacattacaaatctagaggtagaacttttaattttgtctttaagtatatacgataagatatgtttattcataaacgcgtcaaatttttcatgaatcgctaaggagtttaagaatctcatgtcaaattgtcctatataatccacttcggatccataagcaaactgagagactaagttcttaatacttcgattgctcatccaggctcctctctcaggctctattttcatcttgacgacctttggattttcaccagtatgtattcctttacgtgataaatcatcgattttcaaatccatttgtgagaagtctatcgccttagatactttttcccgtagtcgaggtttaaaaaaatacgctaacggtatactagtaggtaactcaaagacatcatatatagaatggtaacgcgtctttaactcgtcggttaactctttcttttgatcgagttcgtcgctactattgggtctgctcaggtgccccgactctactagttccaacatcataccgataggaatacaagacactttgccggcggttgtagatttatcatatttttccactacatatccgttacaatttgttaaaaatttagatacatctatattgctacataatccagctagtgaatatatatgacataataaattggtaaatcctagttctggtattttactaattactaaatctgtatatctttccatttatcatggaaaagaatttaccagatatcttcttttttccaaactgcgttaatgtattctcttacaaatattcacaagatgaattcagtaatatgagtaaaacggaacgtgatagtttctcattggccgtgtttccagttataaaacatagatggcataacgcacacgttgtaaaacataaaggaatatacaaagttagtacagaagcacgtggaaaaaaagtatctcctccatcactaggaaaacccgcacacataaacctaaccgcgaagcaatatatatacagtgaacacacaataagctttgaatgttatagttttctaaaatgtataacaaatacagaaatcaattcgttcgatgagtatatattaagaggactattagaagctggtaatagtttacagatattttccaattccgtaggtaaacgaacagatactataggtgtactagggaataagtatccatttagcaaaattccattggcctcattaactcctaaagcacaacgagagatattttcagcgtggatttctcatagacctgtagttttaactggaggaactggagtgggtaagacgtcacaggtacccaagttattgctttggtttaattatttatttggtggattctctactctagataaaatcactgactttcacgaaagaccagtcattctatctcttcctaggatagctttagttagattgcatagcaataccattttaaaatcattgggatttaaggtactagatggatctcctatttctttacggtacggatctataccggaagaattaataaacaaacaaccaaaaaaatatggaattgtattttctacccataagttatctctaacaaaactatttagttatggcactcttattatagacgaagttcatgagcatgatcaaataggagatattattatagcagtagcgagaaagcatcatacgaaaatagattctatgtttttaatgactgccacgttagaggatgacagggaacggctaaaagtatttttacctaatcccgcatttatacatattcctggagatacactgtttaaaattagcgaggtatttattcataataagataaatccatcttccagaatggcatacatagaagaagaaaagagaaatttagttactgctatacagatgtatactcctcctgatggatcatccggtatagtctttgtggcatccgttgcacagtgtcacgaatataaatcatatttagaaaaaagattaccgtatgatatgtatattattcatggtaaggtcttagatatagacgaaatattagaaaaagtgtattcatcacctaatgtatcgataattatttctactccttatttggaatccagcgttactatacgcaatgttacacacatttatgatatgggtagagtttttgtccccgctccttttggaggatcgcaacaatttatttctaaatctatgagagatcaacgaaaaggaagagtaggaagagttaatcctggtacatacgtctatttctatgatctgtcttatatgaagtctatacagcgaatagattcagaatttctacataattatatattgtacgctaataagtttaatctaacactccccgaagatttgtttataatccctacaaatttggatattctatggcgtacaaaggaatatatagactcgttcgatattagtacagaaacatggaataaattattatccaattattatatgaagatgatagagtatgctaaactttatgtactaagtcctattctcgctgaggagttggataactttgagaggacgggagaattaactagtattgtacgagaagccattttatctctaaatttacaaattaagattttaaattttaaacataaagatgatgatacgtatatacacttttgtaaaatattattcggtgtctataacggaacaaacgctactatatattatcatagacctctaacgggatatatgaatatgatttcagatactatatttgttcctgtagataataactaaaaatcaaactctaatgaccacatctttttttagagatgaaaaattttccacatctccttttgtagacacgactaaacattttgcagaaaaaagtttattagtgtttagataatcgtatacttcatcagtgtagatagtaaatgtgaacagataaaaggtattcttgctcaatagattggtaaattccatagaatatattaatcctttcttcttgagatcccacatcatttcaaccagagacgttttatccaatgatttacctcgtactataccacatacaaaactagattttgcagtgacgtcgtacctggtattcctaccaaacaaaattttacttttagttcttttagaaaattctaaggtagaatctctatttgccaatatgtcatctatggaattaccactagcaaaaaatgatagaaatatatattgatacatcgcagctggttttgatctactatactttaaaaacgaatcagattccataattgcctgtatatcatcagctgaaaaactatgttttacacgtattccttcggcatttctttttaatgatatatcttgtttagacaatgataaagttatcatgtccatgagagacgcgtctccgtatcgtataaatatttcattagatgttagacgcttcattaggggtatacttctataaggtttcttaatcagtccatcattggttgcgtcaagaactactatcggatgttgttgggtatctctagtgttacacatggccttactaaagtttgggtaaataactatgatatctctattaattatagatgcatatatttcattcgtcaaggatattagtatcgacttgctatcgtcattaatacgtgtaatgtaatcatataaatcatgcgatagccaaggaaaatttaaatagatgttcatcatataatcgtcgctataattcatattaatacgttgacattgactaatttgtaatatagcctcgccacgaagaaagctctcgtattcagtttcatcgataaaggataccgttaaatataactggttgccgatagtctcatagtctattaagtggtaagtttcgtacaaatacagaatccctaaaatattatctaatgttggattaatctttaccataactgtataaaatggagacggagtcataactattttaccgtttgtacttactggaatagatgaaggaataatctccggacatgctggtaaagacccaaatgtctgtttgaagaaatccaatgttccaggtcctaatctcttaacaaaaattacgatattcgatcccgatatcctttgcattctatttaccagcatatcacgaactatattaagattatctatcatgtctattctcccaccgttatataaatcgcctccgctaagaaacgttagtatatccatacaatggaatacttcatttctaaaatagtattcgttttctaattctttaatgtgaaatcgtatactagaaagggaaaaattatctttgagttttccgttagaaaagaaccacgaaactaatgttctgattgcgtccgattccgttgctgaattaatggatttacaccaaaaactcatataacttctagatgtagaagcattcgctaaaaaattagtagaatcaaaggatataagtagatgttccaacaagtgagcaattcccaagatttcatctatatcattctcgaatccgaaattagaaattcccaagtagatatcctttttcatccgatcgttgatgaaaatacgaactttattcggtaagacaatcatttactaaggagtaaaataggaagtaatgttcgtatgtcgttatcatcgtataaattaaaggtgtgttttttaccattaagtgacattataattttaccaatattggaattataatataggtgtatttgcgcactcgcgacggttgatgcatcggtaaatatagctgtatctaatgttctagtcggtatttcatcatttcgctgtctaataatagcgttttctctatctgtttccattacagctgcctgaagtttattggtcggataatatgtaaaataataagaaatacatacgaataacaaaaataaaataagatataataaagatgccatttagagatctaattttgtttaacttgtccaaattcctacttacagaagatgaggaatcgttggagatagtgtcttccttatgtagaggatttgaaatatcttataatgacttgataacttactttccagataggaaataccataaatatatttataaagtatttgaacatgtagatttatcggaggaattaagtatggaattccatgatacaactctgagagatttagtctatcttagattgtacaagtattccaagtgtatacggccgtgttataaattaggagataatctaaaaggcatagttgttataaaggacaggaatatttatattagggaagcaaatgatgacttgatagaatatctcctcaaggaatacactcctcagatttatacatattctaatgagcgcgtccccataactggttcaaaattaattctttgtggattttctcaagttacatttatggcgtatacaacgtcgcatataacaacaaataaaaaggtagatgttctcgtttccaaaaaatgtatagatgaactagtcgatccaataaattatcaaatacttcaaaatttatttgataaaggaagcggaacaataaacaaaatactcaggaagatattttattcggtaacaggtggccaaactccataggtagctttttctatttcggattttagaatttccaaattcaccagcgatttatcggttttggtgaaatccaaggatttattaatgtccacaaatgccatttgttttgtctgtggattgtatttgaaaatggaaacgatgtagttagatagatgcgctgcgaagtttcctattagggttccgcgcttcacgtcacccagcatacttgaatcaccatcctttaaaaaaaatgataagatatcaacatggagtatatcatactcgaattttaattcttctactgactcactgacattttcacaaatactacaatacggtttaccgaaaataatcagtacgttcttcatttatgggtatcaaaaacttaaaatcgttactgctggaaaataaatcactgacgatattagatgataatttatacaaagtatacaatggaatatttgtggatacaatgagtatttatatagccgtcgccaattgtgtcagaaacttagaagagttaactacggtattcataaaatacgtaaacggatgggtaaaaaagggagggcatgtaaccctttttatcgatagaggaagtataaaaattaaacaagacgttagagacaagagacgtaaatattctaaattaaccaaggacagaaaaatgttagaattagaaaagtgtacatccgaaatacaaaatgttaccggatttatggaagaagaaataaaggcagaaatgcaattaaaaatcgataaactcacatttcaaatatatttatctgattctgataacataaaaatatcattgaatgagatactaacacatttcaacaataatgagaatgttacattattttattgtgatgaacgagacgcagaattcgttatgtgtctcgaggctaaaacacatttctctaccacaggagaatggccgttgataataagtaccgatcaggatactatgctatttgcatctgctgataatcatcctaagatgataaaaaacttaactcaactgtttaaatttgttccctcggcagaggataactatttagcaaaattaacggcgttagtgaatggatgtgatttctttcctggactctatggggcatctataacacccaccaacttaaacaaaatacaattgtttagtgattttacaatcgataatatagtcactagtttggcaattaaaaattattatagaaagactaactctaccgtagacgtgcgtaatattgttacgtttataaacgattacgctaatttagacgatgtctactcgtatattcctccttgtcaatgcactgttcaagaatttatattttccgcattagatgaaaaatggaatgaatttaaatcatcttatttagaaagcgtgccgttaccctgccaattaatgtacgcgttagaaccacgcaaggagattgatgtttcagaagttaaaactttatcatcttatatagatttcgaaaatactaaatcagatatcgatgttataaaatctatatcctcgatcttcggatattctaacgaaaactgtaacacgatagtattcggcatctataaggataatttactactgagtataaataattcattttactttaacgatagtctgttaataaccaatactaaaagtgataatataataaatataggttactagattaaaaatggtgttccaactcgtgtgctctacatgcggtaaagatatttctcacgaacgatataaattgattatacgaaaaaaatcattaaaggatgtactcgtcagtgtaaagaacgaatgttgtaggttaaaattatctacacaaatagaacctcaacgtaacttaacagtgcaacctctattggatataaactaatatggatccggttaattttatcaagacatatgcgcctagaggttctattatttttattaattataccatgtcattaacaagtcatttgaatccatcgatagaaaaacatgtgggtatttattatggtacgttattatcggaacacttggtagttgaatctacctatagaaaaggagttcgaatagtcccattggatagtttttttgaaggatatcttagtgcaaaagtatacatgttagagaatattcaagttatgaaaatagcagctgatacgtcattaactttattgggtattccgtatggatttggtcatgatagaatgtattgttttaaattggtagctgactgttataaaaatgccggtattgatacatcgtctaaacgaatattgggcaaagatatttttctgagccaaaacttcacagacgataatagatggataaagatatatgattctaataatttaacattttggcaaattgattaccttaaagggtgagttaatatgcataactactcctccgttgttttttccctcgttctttttcttaacgttgtttgccatcactctcataatgtaaagatattctaaaatggtaaacttttgcatatcggacgcagaaattggtataaatgttgtaattgtattatttcccgtcaatggactagtcacagctccatcagttttatatcctttagagtatttctcactcgtgtctaacattctagagcattccatgatctgtttatcgttgatattggccggaaagatagattttttattttttattatattactattggcaattgtagatataacttctggtaaatatttttctaccttttcaatctcttctattttcaagccggctatatattctgctatattgttgctagtatcaataccttttctggctaagaagtcatatgtggtattcactatatcagttttaactggtagttccattagcctttccacttctgcagaataatcagaaattggttctttaccagaaaatccagctactataataggctcaccgatgatcattggcaaaatcctatattgtaccagattaatgagagcatatttcatttccaataattctgctagttcttgagacattgatttatttgatgaatctagttggttctctagatactctaccatttctgccgcatacaataacttgttagataaaatcagggttatcaaagtgtttagcgtggctagaatagtgggcttgcatgtattaaagaatgcggtagtatgagtaaaccgttttaacgaattatatagtctccagaaatctgtggcgttacatacatgagccgaatgacatcgaagattgtccaatatttttaatagctgctctttgtccattatttctatatttgactcgcaacaattgtagataccattaatcaccgattcctttttcgatgccggacaatagcacaattgtttagctttggactctatgtattcagaattaatagatatatctctcaatacagattgcactatacattttgaaactatgtcaaaaattgtagaacgacgctgttctgcagccatttaactttaaataatttacaaaaatttaaaatgagcatccgtataaaaatcgataaactgcgccaaattgtggcatatttttcagagttcagtgaagaagtgtctataaatgtagactcgacggatgagttaatgtatatttttgccgccttgggcggatctgtaaacatttgggcaattatacctctaagtgcatcagtgttttaccgaggagccgaaaatattgtgtttaatcttcctgtgtccaaggtaaaatcgtgtttgtgtagttttcacaatgatgccatcatagatatagaacctgatctggaaaataatctagtaaaactttctagttatcatgtagtaagtgtcgattgtaacaaggaactgatgcctattaggacagatactactatttgtctaagtatagatcaaaagaaatcttacgtgtttaattttcacaagtatgaagaaaaatgttgtggtagaaccgtcattcatctagaatggttgttgggctttatcaagtgtattagtcagcatcagcatctggctattatgtttaaagatgacaatattattatgaagactcctggtaatactgatgcgttttccagggaatattctatgactgaatgttctcaagaactacaaaagttttctttcaaaatagctatctcgtctctcaacaaactacgaggattcaaaaagagagtcaatgtttttgaaactagaatcgtaatggataatgacgataacattttaggaatgttgttttcggatagagttcaatcctttaagatcaacatctttatggcgtttttagattaatactttcaatgagataaatatgggtggcggagtaagtgttgagctccctaaacgggatccgcctccgggagtacccactgatgagatgttattaaacgtggataaaatgcatgacgtgatagctcccgctaagcttttagaatatgtgcatataggaccactagcaaaagataaagaggataaagtaaagaaaagatatccagagtttagattagtcaacacaggacccggtggtctttcggcattgttaagacaatcgtataatggaaccgcacccaattgctgtcgcacttttaatcgtactcattattggaagaaggatggaaagatatcagataagtatgaagagggtgcagtattagaatcgtgttggccagacgttcacgacactggaaaatgcgatgttgatttattcgactggtgtcagggggatacgttcgatagaaacatatgccatcagtggatcggttcagcctttaataggagtaatagaactgtagagggtcaacaatcgttaataaatctgtataataagatgcaaacattatgtagtaaagatgctagtgtaccaatatgcgaatcatttttgcattatttacgcgcacacaatacagaagatagcaaagagatgatcgattatattctaagacaacagtctgcggactttaaacagaaatatatgagatgtagttatcccactagagataagttagaagagtcattaaaatatgcggaacctcgagaatgttgggatccagagtgttcgaatgccaatgttaatttcttactaacacgtaattataataatttaggactttgcaatattgtacgatgtaataccagcgtgaacaacttacagatggataaaacttcctcattaagattgtcatgtggattaagcaatagtgatagattttctactgttcccgtcaatagagcaaaagtagttcaacataatattaaacactcgttcgacctaaaattgcatttgatcagtttattatctctcttggtaatatggatactaattgtagctatttaaatgggtgccgcggcaagcatacagacgacggtgaatacactcagcgaacgtatctcgtctaaattagaacaagaagcgaacgctagtgctcaaacaaaatgtgatatagaaatcggaaatttttatatccgacaaaaccatggatgtaacctcactgttaaaaatatgtgctctgcggacgcggatgctcagttggatgctgtgttatcagccgctacagaaacatatagtggattaacaccggaacaaaaagcatacgtgccagctatgtttactgctgcgttaaacattcagacgagtgtaaacactgttgttagagattttgaaaattatgtgaaacagacttgtaattctagcgcggtcgtcgataacaaattaaagatacaaaacgtaatcatagatgaatgttacggagccccaggatctccaacaaatttggaatttattaatacaggatctagcaaaggaaattgtgccattaaagcgttgatgcaattgacgactaaggccactactcaaatagcacctagacaagttgctggtacaggagttcagttttatatgattgttatcggtgttataatattggcagcgttgtttatgtactatgccaagcgtatgttgttcacatccaccaatgataaaatcaaacttattttagccaataaggaaaacgtccattggactacttacatggacacattctttagaacttctccgatggttattgctaccacggatatgcaaaactgaaaatatattgataatattttaatagattaacatggaagttatcgctgatcgtctagacgatatagtgaaacaaaatatagcggatgaaaaatttgtagattttgttatacacggtctagagcatcaatgtcctgctatacttcgaccattaattaggttgtttattgatatactattatttgttatagtaatttatatttttacggtacgtctagtaagtagaaattatcaaatgttgttggtggtgctagtcatcacattaactattttttattactttatactataatagtactagactgacttctaacaaacatctcacctgccataaataaatgcttgatattaaagtcttctatttctaacactattccatctgtggaaaataatactctgacattatcgctaattgacacatcggtgagtgatatgcctataaagtaataatcttctttgggcacatataccagtgtaccaggttctaacaacctatttactggtgctcctgtagcatactttttctttaccttgagaatatccatcgtttgcttggtcaatagcgatatgtgattttttatcaaccactcaaaaaagtaattggagtgttcatatcctctacgggctattgtctcatggccgtgtatgaaatttaagtaacacgactgtggtagatttgttctatagagccgattgccgcaaatagatagaactaccaatatgtctgtacaaatgttaaacattaattgattaacagaaaaaacaatgttcgttctgggaatagaaaccagatcaaaacaaaattcgttagaatatatgccacgtttatacatggaatataaaataactacagtttgaaaaataacagtatcatttaaacatttaacttgcggggttaatctcacaactttactgtttttgaactgttcaaaatatagcatcgatccgtgagaaatacgtttagccgcctttaatagaggaaatcccaccgcctttctggatctcaccaacgacgatagttctgaccagcaactcatttcttcatcatccacctgttttaacatataataggcaggagatagatatccgtcattgcaatattccttctcgtaggcacacaatctaatattgataaaatctccattctcttctctgcatttattatcttgtctcggtggctgattaggctgtggtcttggtttaggccttggtctatcgttgttgaatctattttggtcattaaatctttcatttcttcctggtatatttctatcacctcgtttggttggatttttgtctatattatcgtttgtaacatcggtacgggtattcatttatcacaaaaaaaacttctctaaatgagtctactgctagaaaacctcatcgaagaagataccatattttttgcaggaagtatatctgagtatgatgatttacaaatggttattgccggcgcaaaatccaaatttccaagatctatgctttctatttttaatatagtacctagaacgatgtcaaaatatgagttggagttgattcataacgaaaatatcacaggagcaatgtttaccacaatgtataatataagaaacaatttgggtctaggagatgataaactaactattgaagccattgaaaactatttcttggatcctaacaatgaagttatgcctcttattattaataatacggatatgactgccgtcattcctaaaaaaagtggtaggagaaagaataagaacatggttatcttccgtcaaggatcatcacctatcttgtgcattttcgaaactcgtaaaaagattaatatttataaagaaaatatggaatccgcgtcgactgagtatacacctatcggagacaacaaggctttgatatctaaatatgcgggaattaatgtcctgaatgtgtattctccttccacatccataagattgaatgccatttacggattcaccaataaaaataaactagagaaacttagtactaataaggaactagaatcgtatagttctagccctcttcaagaacccattaggttaaatgattttctgggactattggaatgtgttaaaaagaatattcctctaacagatattccgacaaaggattgattactataaatggagaatgttcctaatgtatactttaatcctgtgtttatagagcccacgtttaaacattctttattaagtgtttataaacacagattaatagttttatttgaagtattcgttgtattcattctaatatatgtattttttagatctgaattaaatatgttcttcatgcctaaacgaaaaatacccgatcctattgatagattacgacgtgctaatctagcgtgtgaagacgataaattaatgatctatggattaccatggatgacaactcaaacatctgcgttatcaataaatagtaaaccgatagtgtataaagattgtgcaaagcttttgcgatcaataaatggatcacaaccagtatctcttaacgatgttcttcgcagatgatgattcattttttaagtatttggctagtcaagatgatgaatcttcattatctgatatattgcaaatcactcaatatctagactttctgttattattattgatccaatcaaaaaataaattagaagctgtgggtcattgttatgaatctctttcagaggaatacagacaattgacaaaattcacagactttcaagattttaaaaaactgtttaacaaggtccctattgttacagatggaagggtcaaacttaataaaggatatttgttcgactttgtgattagtttgatgcgattcaaaaaagaatcctctctagctaccaccgcaatagatcctgttagatacatagatcctcgtcgtgatatcgcattttctaacgtgatggatatattaaagtcgaataaagtgaacaataattaattctttattgtcatcatgaacggcggacatattcagttgataatcggccccatgttttcaggtaaaagtacagaattaattagacgagttagacgttatcaaatagctcaatataaatgcgtgactataaaatattctaacgataatagatacggaacgggactatggacgcatgataagaataattttgaagcattggaagcaactaaactatgtgatgtcttggaatcaattacagatttctccgtgataggtatcgatgaaggacagttctttccagacattgtttaattctgtgagcgtatggcaaacgaaggaaaaatagttatagtagccgcactcgatgggacatttcaacgtaaaccgtttaataatattttgaatcttattccattatctgaaatggtggtaaaactaactgctgtgtgtatgaaatgctttaaggaggcttccttttctaaacgattgggtgaggaaaccgagatagagataataggaggtaatgatatgtatcaatcggtgtgtagaaagtgttacgtcggctcataatattatattttttatctaaaaaactaaaaataaacattgattaaattttaatataatacttaaaaatggatgttgtgtcgttagataaaccgtttatgtattttgaggaaattgataatgagttagattacgaaccagaaagtgcaaatgaggtcgcaaaaaaactgccgtatcaaggacagttaaaactattactaggagaattattttttcttagtaagttacagcgacacggtatattagatggtgccaccgtagtgtatataggatcggctcctggtacacatatacgttatttgagagatcatttctataatttaggagtgatcatcaaatggatgctaattgacggccgccatcatgatcctattttaaatggattgcgtgatgtaactctagtgactcggttcgttgatgaggaatatctacgatccatcaaaaaacaactgcatccttctaagattattttaatttctgatgtaagatccaaacgaggaggaaatgaacctagtacggcggatttactaagtaattacgctctacaaaatgtcatgattagtattttaaaccccgtggcgtctagtcttaaatggagatgcccgtttccagatcaatggatcaaggacttttatatcccacacggtaataaaatgttacaaccttttgctccttcatattcagctgaaatgagattattaagtatttataccggtgagaacatgagactgactcgagttaccaaattagacgctgtaaattatgaaaaaaagatgtactaccttaataagatcgtccgtaacaaagtagttgttaactttgattatcctaatcaggaatatgactattttcacatgtactttatgctgaggaccgtgtactgcaataaaacatttcctactactaaagcaaaggtactatttctacaacaatctatatttcgtttcttaaatattccaacaacatcaactgaaaaagttagtcatgaaccaatacaacgtaaaatatctagcaaaaattctatgtctaaaaacagaaatagcaagagatccgtacgcggtaataaatagaaacgtactactgagatatactaccgatatagagtataatgatttagttactttaataaccgttagacataaaattgattctatgaaaactgtgtttcaggtatttaacgaatcatccataaattatactccggttgatgatgattatggagaaccaatcattataacatcgtatcttcaaaaaggtcataacaagtttcctgtaaattttctatacatagatgtggtaatatctgacttatttcctagctttgttagactagatactacagaaactaatatagttaatagtgtactacaaacaggcgatggtaaaaagactcttcgtcttcccaaaatgttagagacggaaatagttgtcaagattctctatcgccctaatataccattaaaaattgttagatttttccgcaataacatggtaactggagtagagatagccgatagatctgttatttcagtcgctgattaatcaattagtagagatgagataagaacattataataatcaataatatatcttatatcttatatcttatatcttatatcttgtttagaaaaatgctaatattaaaatagctaacgctagtaatccaatcggaagccatttgatatctataatagggtatctaatttcctgatttaaatagcggacagctatattctcggtagctactcgtttggaatcacaaacattatttacatctaatttactatctgtaatggaaacgtttcccaatgaaatggtacaatccgatacattgcattttgttatatttttttttaaagaggctggtaacaacgcatcgcttcgtttacatggctcgtaccaacaataatagggtaatcttgtatctattcctatccgtactatgcttttatcaggataaatacatttacatcgtatatcgtctttgttagcatcacagaatgcataaatttgttcgtccgtcatgataaaaatttaaagtgtaaatataactattatttttatagttgtaataaaaagggaaatttgattgtatactttcggttctttaaaagaaactgacttgataaaaatggctgtaatctctaaggttacgtatagtctatatgatcaaaaagagattaatgctacagatattatcattagtcatgttaaaaatgacgacgatatcggtaccgttaaagatggtagactaggtgctatggatggggcattatgtaagacttgtgggaaaacggaattggaatgtttcggtcactggggtaaagtaagtatttataaaactcatatagttaagcctgaatttatttcagaaattattcgtttactgaatcatatatgtattcactgcggattattgcgttcacgagaaccgtattccgacgatattaacctaaaagagttatcgggacacgctcttaggagattaaaggataaaatattatccaagaaaaagtcatgttggaacagtgaatgtatgcaaccgtatcaaaaaattactttttcaaagaaaaaggtttgtttcgtcaacaagttggatgatattaacgttcctaattctctcatctatcaaaagttaatttctattcatgaaaagttttggccattattagaaattcatcaatatccagctaacttattttatacagactactttcccatccctccgttgattattagaccggctattagtttttggatagatagtatacccaaagagaccaatgaattaacttacttattaggtatgatcgttaagaattgtaacttgaatgctgatgaacaggttatccagaaggcggtaatagaatacgatgatattaaaattatttctaataacactaccagtatcaatttatcatatattacatccggcaaaaataatatgattagaagttatatcgtcgcccgacgaaaagatcagaccgctagatctgtaattggtcccagtacatctatcaccgttaatgaggtaggaatgcccgcatatattagaaatacacttacagaaaagatatttgttaatgcctttacagtggataaagttaaacaactattagcgtcaaaccaagttaaattttactttaataaacgattaaaccaattaacaagaatacgccaaggaaagtttattaaaaataaaatacatttattgcctggtgattgggtagaagtagctgttcaagaatatacaagtattatttttggaagacagccgtctctacatagatacaacgtcatcgcttcatctatcagagctaccgaaggagatactatcaaaatatctcccggaattgccaactctcaaaatgctgatttcgacggggatgaggaatggatgatattagaacaaaatcctaaagctgtaattgaacaaagtattcttatgtatccgacgacgttactcaaacacgatattcatggagcccccgtttatggatctattcaagatgaaatcgtagcagcgtattcattgtttaggatacaagatctttgtttagatgaagtattgaacatcttggggaaatatggaagagagttcgatcctaaaggtaaatgtaaattcagcggtaaagatatctatacttacttgataggtgaaaagattaattatccgggtctcttaaaggatggtgaaattattgcaaacgacgtagatagtaattttgttgtggctatgaggcatctgtcattggctggactcttatccgatcataagtcgaacgtggaaggtatcaactttattatcaagtcatcttatgtttttaagagatatctatctatttacggttttggggtgacattcaaagatctgagaccaaattcgacgttcactaataaattggaggccatcaacgtagaaaaaatagaacttatcaaagaagcatacgccaaatatctcaacgatgtaagagacgggaaaatagttccattatctaaagctttagaggcggactatgtggaatccatgttatccaacttgacaaatcttaatatccgagagatagaagaacatatgagacaaacgctgatagatgatccagataataacctcctgaaaatggccaaagcgggttataaagtaaatcccacagaactaatgtatattctaggtacgtatggacaacaaaggattgatggtgaaccagcagagactcgagtattgggtagagttttaccttactatcttccagactctaaggatccagaaggaagaggttacattcttaattctttaacaaaaggattaacgggttctcaatattacttttcgatgctggttgccagatctcaatctactgatatcgtctgtgaaacatcacgtaccggaacactggctagaaaaatcattaaaaagatggaggatatggtggtcgacggatacggacaagtagttataggtaatacgctcatcaagtacgccgccaattataccaaaattctaggctcagtatgtaaacctgtagatcttatctatccagatgagtccatgacttggtatttggaaattagtgctctgtggaataaaataaaacagggattcgtttactctcagaaacagaaacttgcaaagaagacattggcgccgtttaatttcctagtattcgtcaaacccaccactgaggataatgctattaaggttaaggatctgtacgatatgattcataacgtcattgatgatgtgagagagaaatacttctttacggtatctaatatagattttatggagtatatattcttgacgcatcttaatccttctagaattagaattacaaaagaaacggctatcactatctttgaaaagttctatgaaaaactcaattatactctaggtggtggaactcctattggaattatttctgcacaggtattgtctgagaagtttacacaacaagccctgtccagttttcacactactgaaaaaagtggtgccgtcaaacaaaaacttggtttcaacgagtttaataacttgactaatttgagtaagaataagaccgaaattatcactctggtatccgatgatatctctaaacttcaatctgttaagattaatttcgaatttgtatgtttgggagaattaaatccaaacatcactcttcgaaaagaaacagataaatatgtagtagatataatagtcaatagattatacatcaagagagcagaaataaccgaattagtcgtcgaatatatgattgaacgatttatctcctttagcgtcattgtaaaggaatggggtatggagacattcattgaggacgaggataatattagatttactgtctacctaaatttcgttgaaccggaagaattgaatcttagtaagtttatgatggttcttccgggggcagccaacaagggaaagattagtaaattcaagattcctatctctgattatacgggatatgacgacttcaatcaaacaaaaaagctcaataagatgactgtagaactcatgaatctaaaagaattgggttctttcgatttggaaaacgtcaacgtgtatcctggagtatggaatacatacgatatcttcggtatcgaggccgctcgtgaatacttgtgcgaagccatgttaaacacctatggagaagggttcgattatctgtatcagccttgtgatcttctcgctagtttactatgtgctagttacgaaccagaatcagtgaataaattcaagttcggcgcagctagtactcttaagagagctacgttcggagacaataaagcattgttaaacgcggctcttcataaaaagtcagaacctattaacgataatagtagctgccacttttttagcaaggtccctaatataggaactggatattacaaatactttatcgacttgggtcttctcatgagaatggaaaggaaactatctgataagatatcttctcaaaagatcaaggaaatggaagaaacagaagacttttaattcttatcaataacatatttttctatgatctgtcttttaaacgatggattttccacaaatgcgcctctcaagtccctcatagaatgatacacgtataaaaaatatagcataggcaatgactccttatttttagacattagatatgccaaaatcatagccccgcttctatttactcccgcagcacaatgaaccaacacgggctcgtttcgttgatcacatttagataaaaaggcggttacgtcgtcaaaatatttactaatatcggtagttgtatcatctaccaacggtatatgaataatattaatattagagttaggtaatgtatatttatccatcgtcaaatttaaaacatatttgaacttaacttcagatgatggtgcatccatagcatttttataatttcccaaatacacattattggttacccttgtcattatagtgggagatttggctttgtgcatatctccagttgaacgtagtagtaagtatttatacaaacttttcttatccatttataacgtacaaatggataaaactactttatcggtaaacgcgtgtaatttagaatacgttagagaaaaggctatagtaggcgtacaagcagccaaaacatcaacacttatattctttgttattatattggcaattagtgcgctattactctggtttcagacgtctgataatccagtctttaatgaattaacgagatatatgcgaattaaaaatacggttaacgattggaaatcattaacggatagcaaaacaaaattagaaagtgatagaggtagacttctagccgctggtaaggatgatatatttgaattcaaatgtgtggatttcggcgcctattttatagctatgcgattggataagaaaacatatctgccgcaagctattaggcgaggtactggagacgcgtggatggttaaaaaggcggcaaaggtcgatccatctgctcaacaattttgtcagtatttgataaaacacaagtctaataatgttattacttgtggtaatgagatgttaaatgaattaggttatagcggttattttatgtcaccgcattggtgttccgattttagtaatatggaatagtgttagataaatgcggtaacgaatgttcctgtaaggaaccataacagcttagatttaacgttaaagatgagcataaacataataaacaaaattacaatcaaacttataacattaatatcaaacaatccaaaaaatgaaatcagtggagtagtaaacgcgtacataactcctggataacgtttagcagctgccgttcctattctagaccaaaaattcggtttcatgttttcgaaacggtattctgcaacaagtcgaggatcgtgttctacatatttggcggcattatccagtatctgcctattgatcttcatttcgttttcgattctggctatttcaaaataaaatcccgatgatagacctccagactttataatttcatctacgatgttcagcgccgtagtaactctaataatataggctgataagctaacatcataccctcctgtatatgtgaatatggcatgatttttgtccattacaagctcggttttaactttattgcctgtaataatttctctcatctgtaggatatctatttttttgtcatgcattgccttcaagacgggacgaagaaacgtaatatcctcaataacgttatcgttttctacaataactacatattctacctttttattttctaactcggtaaaaaaattagaatcccatagggctaaatgtctagcgatatttcttttcgtttcctctgtacacatagtgttacaaaaccctgaaaagaagtgagtatacttgtcatcatttctaatgtttcctccagtccactgtataaacgcataatccttgtaatgatctggatcatccttgactaccacaacatttcttttttctggcataacttcgttgtcctttacatcatcgaacttctgatcattaatatgctcatgaacattaggaaatgtttctgatggaggtctatcaataactggcacaacaataacaggagttttcaccgccgccatttagttattgaaattaatcatatacaactctttaatacgagttatattttcgtctatccattgtttcacattgacatatttcgacaaaaagatataaaatgcgtattccaatgcttctctgtttaatgaattactaaaatatacaaacacgtcactgtctggcaataaatgatatcttagaatattgtaacaatttattttgtattgcacatgttcgtgatctatgagttcttcttcgaatggcataggatctccgaatctgaaaacgtataaataggagttagaataataatatttgagagtattggtaatatataaactctttagcggtataattagtttttttctctcaatttctatttttagatgtgatggaaaaatgactaattttgtagcattagtatcatgaactctaatcaaaatcttaatatcttcgtcacacgttagctctttgaagtttttaagagatgcatcagttggttctacagatggagtaggtgcaacaattttttgttctacacatgtatgtactggagccattgttttaactataatggtgcttgtatcgaaaaactttaatgcagatagcggaagctcttcgccgcgactttctacgtcgtaattgggttctaacgccgatctctgaatggatactagttttctaagttctaatgtgattctctgaaaatgtaaatccaattcctccggcattatagatgtgtatacatcggtaaataaaactatagtatccaacgatcccttctcgcaaattctagtcttaaccaaaaaatcgtatataaccacggagatggcgtatttaagagtggattcttctaccgttttgttcttggatgtcatataggaaactataaagtccgcactactgttaagaatgattactaacgcaactatatagtttaaattaagcattttggaaacataaaataactctgtagacgatacttgactttcgaataagtttgcagacaaacgaagaaagaacagacctctcttaatttcagaagaaaactttttttcgtattcctgacgtctagagtttatatcaataagaaagttaagaattagtcggttaatgttgtatttcattacccaagtttgagatttcataatattatcaaaagacatgataatattaaagataaagcgctgactatgaacgaaatagctatatggttcgctcaagaatatagtcttgttaaacgtggaaacgataactgtatttttaatcacgtcagcggcatctaaattaaatataggtatatttattccacacactctacaatatgccacaccatcttcataataaataaattcgttagcaaaattattaattttagtgaaatagttagcgtcaactttcatagcttccttcaatctaatttgatgctcacacggtgcgaattccactctaacatcccttttccatgcctcaggttcatcgatctctataatatctagttttttgcgtttcacaaacacaggctcgtctctcgcgatgagatctgtatagtaactatgtaaatgataactagatagaaagatgtagctatatagatgacgatcctttaagagaggtataataactttaccccaatcagatagactgttgttatggtcttcggaaaaagaatttttataaatttttccagtattttccaaatatacgtacttaacatctaaaaaatccttaatgataataggaatggataatccgtctattttataaagaaatacatatcgcacattatacttttttttggaaatgggaataccgatgtgtctacataaatatgcaaagtctaaatattttttagagaatcttagttggtccaaattcttttccaagtacggtaatagatttttcatattgaacggtatcttcttaatctctggttctagttccgcattaaatgatgaaactaagtcactatttttataactaacgattacatcacctctaacatcatcatttaccagaatactgatcttcttttgtcgtaaatacatgtctaatgtgttaaaaaaaagatcatacaagttatacgtcatttcatctgtggtattcttgtcattgaaggataaactcgtactaatctcttctttaacagcctgttcaaatttatatcctatatacgaaaaaatagcaaccagtgtttgatcatccgcgtcaatattctgttctatcgtagtgtataacaatcgtatatcttcttctgtgatagtcgatacgttataaaggttgataacgaaaatatttttatttcgtgaaataaagtcatcgtaggattttggacttatattcgcgtctagtagatatgcttttatttttggaatgatctcaattagaatagtctctttagagtccatttaaagttacaaacaactaggaaattggtttatgatgtataatttttttagtttttatagattctttattctatacttaaaaaatgaaaataaatacaaaggttcttgagggttgtgttaaattgaaagcgagaaataatcataaattatttcattatcgcgatatccgttaagtttgtatcgtaatggcgtggtcaattacgaataaagcggatactagtagcttcacaaagatggctgaaatcagagctcatctaaaaaatagcgctgaaaataaagataaaaacgaggatattttcccggaagatgtaataattccatctactaagcccaaaaccaaacgagccactactcctcgtaaaccagcggctactaaaagatcaaccaaaaaggaggaagtggaagaagaagtagttatagaggaatatcatcaaacaactgaaaaaaattctccatctcctggagtcagcgacattgtagaaagcgtggccgctgtagagctcgatgatagcgacggggatgatgaacctatggtacaagttgaagctggtaaagtaaatcatagtgctagaagcgatctctctgacctaaaggtggctaccgacaatatcgttaaagatcttaagaaaattattactagaatctctgcagtatcgacggttctagaggatgttcaagcagctggtatctctagacaatttacttctatgactaaagctattacaacactatctgatctagtcaccgagggaaaatctaaagttgttcgtaaaaaagttaaaacttgtaagaagtaaatgcgtgcacttttttataaagatggtaaactctttaccgataataattttttaaatcctgtatcagacgataatccagcgtatgaggttttgcaacatgttaaaattcctactcatttaacagatgtagtagtatatgaacaaacgtgggaggaggcgttaactagattaatttttgtgggaagtgattcaaaaggacgtagacaatacttttacggaaaaatgcatgtacagaatcgcaacgctaaaagagatcgtatttttgttagagtatataacgttatgaaacgaattaattgttttataaacaaaaatataaagaaatcgtccacagattccaattatcagttggcggtttttatgttaatggaaactatgttttttattagatttggtaaaatgaaatatcttaaggagaatgaaacagtagggttattaacactaaaaaataaacacatagaaataagtcccgatgaaatagttatcaagtttgtaggaaaggacaaagtttcacatgaatttgttgttcataagtctaatagactatataaaccgctattgaaactgacggatgattctagtcccgaagaatttctgttcaacaaactaagtgaacgaaaggtatacgaatgtatcaaacagtttggtattagaatcaaggatctccgaacgtatggagtcaattatacgtttttatataatttttggacaaatgtaaagtccatatctcctcttccgtcaccaaaaaagttaatagcattaactatcaaacaaactgctgaagtggtaggtcatactccatcaatttcaaaaagagcttatatggcaacgactattttagaaatggtaaaggataaaaattttttagatgtagtatctaaaactacgttcgatgaattcctatctatagtcgtagatcacgttaaatcatctacggatggatgatatagatctttacacaaataattacaagaccgataaatggaaatggataagcgtatgaaatctctcgcaatgacagctttcttcggagagctaagcacattagatattatggcattgataatgtctatatttaaacgccatccaaacaataccattttttcagtggataaggatggtcagtttatgattgatttcgaatacgataattataaggcttctcaatatttggatctgaccctcactccgatatctggagatgaatgcaagactcacgcatcgagtatagccgaacaattggcgtgtgcggatattattaaagaggatattagcgaatatatcaaaactactccccgtcttaaacgatttataaaaaaataccgcaatagatcagatactcgtatcagtcgagatacagaaaagcttaaaatagctctagctaaaggcatagattacgaatatataaaagacgcttgttaataagtaaatgaaaaaaaactagtcgtttataataaaacacgatatggatgccaacgtagtatcattttctactattgcgacgtatatagacgctttagcgaagaatgcttcggaattagaacagaggtctaccgcatacgaaataaataatgaattggaactagtatttattaagccgccattgattactttgacaaatgtagtgaatatctctacgattcaggaatcgtttattcgatttaccgttactaataaggaaggtgttaaaattagaactaagattccattatctaaggtacatggtctagatgtaaaaaatgtacagttagtagatgctatagataacatagtttgggaaaagaaatcattagtgacggaaaatcgtcttcacaaagaatgcttgttgagactatcgacagaggaacgtcatatatttttggattacaagaaatatggatcctctatccgactagaattagtcaatcttattcaagcaaaaacaaaaaactttacgatagactttaagctaaaatattttctaggatccggtgcccagtctaaaagttctttgttgcacgctattaatcatccaaagtcaaggcctaatacatctctggaaatagaattcacacctagagacaatgaaacagttccatatgatgaactaataaaggaattgacgactctctcgcgtcatatatttatggcttctccagagaatgtaattctttctccgcctattaacgcgcctataaaaacctttatgttgcctaaacaagatatagtaggtttggatctggaaaatctatatgccgtaactaagactgacggcattcctataactatcagagttacatcaaacgggttgtattgttattttacacatcttggttatattattagatatcctgttaagagaataatagattccgaagtagtagtctttggtgaggcagttaaggataagaactggaccgtatatctcattaagctaatagagcctgtgaatgcaatcaatgatagactagaagaaagtaagtatgttgaatctaaactagtggatatttgtgatcggatagtattcaagtcaaagaaatacgaaggtccgtttactacaactagtgaagtcgtcgatatgttatctacatatttaccaaagcaaccagaaggtgttattctgttctattcaaagggacctaaatctaacattgattttaaaattaaaaaggaaaatactatagaccaaactgcaaatgtagtatttaggtacatgtccagtgaaccaattatctttggagaatcgtctatctttgtagagtataagaaatttagcaacgataaaggctttcctaaagaatatggttctggtaagattgtgttatataacggcgttaattatctaaataatatctattgtttggaatatattaatacacataatgaagtgggtattaagtccgtggttgtacctattaagtttatagcagaattcttagttaatggagaaatacttaaacctagaattgataaaaccatgaaatatattaactcagaagattattatggaaatcaacataatatcatagtcgaacatttaagagatcaaagcatcaaaataggagatatctttaacgaggataaactatcggatgtgggacatcaatacgccaataatgataaatttagattaaatccagaagttagttattttacgaataaacgaactagaggaccgttgggaattttatcaaactacgtcaagactcttcttatttctatgtattgttccaaaacatttttagacgattccaacaaacgaaaggtattggcgattgattttggaaacggtgctgacctggaaaaatacttttatggagagattgcgttattggtagcgacggatccggatgctgatgctatagctagaggaaatgaaagatacaacaaattaaactctggaattaaaaccaagtactacaaatttgactacattcaggaaactattcgatccgatacatttgtctctagtgtcagagaagtattctattttggaaagtttaatatcatcgactggcagtttgctatccattattcttttcatccgagacattatgctaccgtcatgaataacttatccgaactaactgcttctggaggcaaggtattaatcactaccatggacggagacaaattatcaaaattaacagataaaaagacttttataattcataagaatttacctagtagcgaaaactatatgtctgtagaaaaaatagctgatgatagaatagtggtatataatccatcaacaatgtctactccaatgactgaatacattatcaaaaagaacgatatagtcagagtgtttaacgaatacggatttgttcttgtagataacgttgatttcgctacaattatagaacgaagtaaaaagtttattaatggcgcatctacaatggaagatagaccgtctacaaaaaactttttcgaactaaatagaggagccattaaatgtgaaggtttagatgtcgaagacttacttagttactatgttgtttatgtcttttctaagcggtaaataataatatggtatgggttctgatctcccagttctaaatgcattaaataattccaatagagcgatttttgttcctataggaccttccaactgtggatactctgtattgttaatagatatattaatacttttgtcgggtaacagaggttctacgtcttctaaaaataaaagttttataacatctggcctgttcataaataaaaacttggcgattctatatatactcttattatcaaatctagccattgtcttatagatgtgagctactgtaggtgtaccatttgattttctttctaatactatatatttctctcgaagaagttcttgcacatcatctgggaataaaatactactgttgagtaaatcagttattttttttatatcgatattgatggacatttttatagttaaggataataagtatcccaaagtcgataacgacgataacgaagtatttatacttttaggaaatcacaatgactttatcagattaaaattaacaaaattaaaggagcatgtatttttttctgaatatattgtgactccagatacatatggatctttatgcgtcgaattaaatgggtctagttttcagcacggcggtagatatatagaggtggaggaatttatagatgctggaagacaagttagatggtgttctacatccaatcatatatctaaagatatacccgaagatatgcacactgataaatttgtcatttatgatatttatacgtttgattcgttcaagaataaacgattggtattcgtacaggtacctccgtcgttaggagatgatagtcatttgactaatccgttattgtcaccgtattatcgtaattcagtagccagacaaatggtcaatgatatgatttttaatcaagattcatttttaaaatatttattagaacatctgattagaagccactatagagtttctaaacatataacaatagttagatacaaggataccgaagaattaaatctaacgagaatatgttataatagagataagtttaaggcgtttgtattcgcttggtttaacggcgtttcggaaaatgaaaaggtactagatacgtataaaaaggtatctaatttgatataatgaattcagtgactgtatcacacgcgccatatactattacttatcacgatgattgggaaccagtaatgagtcaattggtagagttttataacgaagtagccagttggctgctacgagacgagacgtcgcctattcctgataagttctttatacagttgaaacaaccgcttagaaataaacgagtatgtgtgtgtggtatagatccgtatccgaaagatggaactggtgtaccgttcgaatcaccaaattttacaaaaaaatcaattaaggagatagcttcatctatatctagattaaccggagtaattgattataaaggttataaccttaatataatagacggggttataccctggaattattacttaagttgtaaattaggagaaacaaaaagtcacgcgatttactgggataagatttccaagttactgctgcagcatataactaaacacgttagtgttctttattgtttgggtaaaacagatttctcgaatatacgggccaagttagaatccccggtaactaccatagtcggatatcatccagcggctagagaccgccaattcgagaaagatagatcatttgaaattatcaacgttttactggaattagacaacaaggcacctataaattgggctcaagggtttatttattaatgctttagtgaaattttaacttgtgttctaaatggatgcggctattagaggtaatgatgttatctttgttcttaagactataggtgtcccgtcagcgtgcagacaaaatgaagatccaagatttgtagaagcatttaaatgcgacgagttagaaagatatattgagaataatccagaatgtacactattcgaaagtcttagggatgaggaagcatactctatagtcagaattttcatggatgtagatttagacgcgtgtctagacgaaatagattatttaacggccattcaagattttattatcgaggtgtcaaactgtgtagctagattcgcgtttacagaatgcggcgccattcatgaaaatgtaataaaatccatgagatctaatttttcattgactaagtctacaaatagagataaaacaagttttcatattatctttttagatacgtataccactatggatacattgatagctatgaaacgaacactattagaattaagtagatcatctgaaaatccactaaccagatcgatagacactgccgtatataggagaaaaacaactcttcgggttgtaggtactaggaaaaatccaaattgcgacactattcatgtaatgcaaccaccgcatgataatatagaagattacctattcacttacgtggatatgaacaacaatagttattacttttctctacaacaacgattggaggatttagttcctgataagttatgggaaccagggtttatttcattcgaagacgctataaaaagagtttcaaaaatattcattaattctataataaactttaatgatctcgatgaaaataattttacaacggtaccactggtcatagattacgtaacaccttgtgcattatgtaaaaaacgatcgcataaacatccgcatcaactatcgttggaaaatggtgctattagaatttacaaaactggtaatccacatagttgtaaagttaaaattgttccgttggatggtaataaactgtttaatattgcacaaagaattttagacactaactctgttttattaaccgaacgaggagaccatatagtttggattaataattcatggaaatttaacagcgaagaacccttgataacaaaactaattttgtcaataagacatcaactacctaaggaatattcaagcgaattactctgtccaagaaaacgaaagactgtagaagctaacatacgagacatgttagtagattcagtggagaccgatacctatccggataaacttccgtttaaaaatggtgtattggacctggtagacggaatgttttactctggagatgatgctaaaaaatatacgtgtactgtatcaaccggatttaaatttgacgatacaaagttcgtcgaagacagtccagaaatggaagagttaatgaatatcattaacgatatccaaccattaacggatgaaaataagaaaaatagagagctatatgaaaaaacattatctagttgtttatgcggtgctaccaaaggatgtttaacattcttttttggagaaactgcaactggaaagtcgacaaccaaacgtttgttaaagtctgctatcggtgacctgtttgttgagacgggtcaaacaattttaacagatgtattggataaaggacctaatccatttatcgctaacatgcatttgaaaagatctgtattctgtagcgaactacctgattttgcctgtagtggatcaaagaaaattagatctgacaatattaaaaagttgacagaaccttgtgtcattggaagaccgtgtttctccaataaaattaataatagaaaccatgcgacaatcattatcgatactaattacaaacctgtttttgataggatagataacgcattaatgagaagaattgccgtcgtgcgattcagaacacacttttctcaaccttctggtagagaggctgctgaaaataatgacgcgtacgataaagtcaaactattagacgaggggttagatggtaaaatacaaaataatatatatagatttgcatttctatacttgttggtgaaatggtacaaaaaatatcatgttcctattatgaaactatatcctacacccgaagagattcctgactttgcattctatctcaaaataggtactctgttggtatctagctctgtaaagcatattccattaatgacggacctctccaaaaagggatatatattgtacgataatgtggtcactcttccgttgactactttccaacagaaaatatccaagtattttaattctagactatttggacacgatatagagagcttcatcaatagacataagaaatttgccaatgttagtgatgaatatctgcaatatatattcatagaggatatttcatctccgtaaatatatgctcatatatttatagaagatatcacatatctaaatgaataccggaatcatagatttatttgataatcatgttgatagtataccaactatattacctcatcagttagctactctagattatctagttagaactatcatagatgagaacagaagcgtgttattgttccatattatgggatcaggtaaaacaataatcgctttgttgttcgccttggtagcttccagatttaaaaaggtttacattctagtgccgaacatcaacatcttaaaaattttcaattataatatgggtgtagctatgaacttgtttaatgacgaattcatagctgagaatatctttattcattccacaacaagtttttattctcttaattataacgataacgtcattaattataacggattatctcgctacaataactctatttttatcgttgatgaggcacataatatctttgggaataatactggagaacttatgaccgtgataaaaaataaaaacaagattccttttttactattgtctggatctcccattactaacacacctaatactctgggtcatattatagatttaatgtccgaagagacgatagattttggtgaaattattagtcgtggtaagaaagtaattcagacacttcttaacgaacgcggtgtgaatgtacttaaggatttgcttaaaggaagaatatcatattacgaaatgcctgataaagatctaccaacgataagatatcacggacgtaagtttctagatactagagtagtatattgtcacatgtctaaacttcaagagagagattatatgattactagacgacagctatgttatcatgaaatgtttgataaaaatatgtataacgtgtcaatggcagtattgggacaacttaatctgatgaataatttagatactttatttcaggaacaggataaggaattgtacccaaatctgaaaataaataatggcgtgttatacggagaagaattggtaacgttaaacattagttccaaatttaaatactttattaatcggatacagacactcaacggaaaacattttatatacttttctaattctacatatggcggattggtaattaaatatatcatgctcagtaatggatattctgaatataatggttctcagggaactaatccacatatgataaacggcaaaccaaaaacatttgctatcgttactagtaaaatgaaatcgtctttagaggatctattagatgtgtataattctcctgaaaacgatgatggtagtcaattgatgtttttgttttcatcaaacattatgtccgaatcctatactctaaaagaggtaaggcatatttggtttatgactatcccagatactttttctcaatacaaccaaattcttggacgatctattagaaaattctcttacgccgatatttctgaaccagttaatgtatatcttttagccgccgtatattccgatttcaatgacgaagtgacgtcattaaacgattacacacaggatgaattaattaatgttttaccatttgacatcaaaaagctgttgtatctaaaatttaagacgaaagaaacgaatagaatatactctattcttcaagagatgtctgaaacgtattctcttccaccacatccatcaattgtaaaagttttattgggagaattggtcagacaatttttttataataattctcgtattaagtataacgataccaagttacttaaaatggttacatcagttataaaaaataaagaagacgctaggaattacatagatgatattgtaaacggtcacttctttgtatcgaataaagtatttgataaatctcttttatacaaatacgaaaacgatattattacagtaccgtttagactttcctacgaaccatttgtttggggagttaactttcgtaaagaatataacgtggtatcttctccataaaactgatgagatatataaagaaataaatgtcgagctttgttaccaatggatacctttccgttacattggaaccacacgagctgacgttagacataaaaactaatattaggaatgccgtatataagacgtatctccatagagaaattagtggtaaaatggccaagaaaatagaaattcgtgaagacgtggaattacctctcggcgaaatagttaataattctgtagttataaacgttccgtgtgtaataacctacgcgtattatcacgttggggatatagtcagaggaacattaaacatcgaagatgaatcaaatgtaactattcaatgtggagatttaatctgtaaactaagtagagattcgggtactgtatcatttagcgattcaaagtactgcttttttcgaaatggtaatgcgtatgacaatggcagcgaagtcactgccgttctaatggaggctcaacaaggtatcgaatctagttttgtttttctcgcgaatatcgtcgactcataaaaaagagaatagcggtaagtataaacacgaatactatggcaataattgcgaatgttttattctcttcgatatatttttgataatatgaaaaacatgtctctctcaaatcggacaaccatctcataaaatagttctcgcgcgctggagaggtagttgccgctcgtataatctctccagaataatatacttgcgtgtcgtcgttcaatttatacggatttctatagttctctgttatataatgcggtttgccctcatgattagacgacgacaatagtgttctaaatttagatagttgatcagaatgaatgtttattggcgttggaaaaattatccatacagcgtctgcagagtggttgatagttgttcctagatatgtaaaataatccaacttactaggcagcaaattgtctagataaaatactgaatcaaacggtgcagacgtattggcggatctaatggaatccaattgattaactatcttttgaaaatatacatttttatgatccaatacttgtaagaatatagaaataatgataagtccatcatcgtgtttttttgcctcttcataagaactatattttttcttattccaatgaacaagattaatctctccagagtatttgtacacatctatcaagtgattggatccataatcgtcttcctttccccaatatatatgtagtgatgataacacatattcattggggagaaaccctccacttatatatcctcctttaaaattaatccttactagttttccagtgttctggatagtggttggtttcgactcattataatgtatgtctaacggcttcaatcgcgcgttagaaattgcttttttagtttctatattaataggagatagttgttgcggcatagtaaaaatgaaatgataactgtttaaaaatagctcttagtatgggaattacaatggatgaggaagtgatatttgaaactcctagagaattaatatctattaaacgaataaaagatattccaagatcaaaagacacgcatgtgtttgctgcgtgtataacaagtgacggatatccgttaataggagctagaagaacttcattcgcgttccaggcgatattatctcaacaaaattcagattctatctttagagtatccactaaactattacggtttatgtactacaatgaactaagagaaatctttagacggttgagaaaaggttctatcaacaatatcgatcctcactttgaagagttaatattattgggtggtaaactagataaaaaggaatctattaaagattgtttaagaagagaattaaaagaggaaagtgatgaacgtataacagtaaaagaatttggaaatgtaattctaaaacttacaacacgggataaattatttaataaagtatatataagttattgcatggcgtgttttattaatcaatcgttggaggatttatcgcatactagtatttacaatgtagaaattagaaagattaaatcattaaatgattgtattaacgacgataaatacgaatatctgtcttatatttataatatgctagttaatagtaaatgaacttttacagatctagtataattagtcagattattaagtataatagacgactagctaagtctattatttgcgaggatgactctcaaattattacactcacggcattcgttaaccaatgcctatggtgtcataaacgagtatccgtgtccgctattttattaactactgataacaaaatattagtatgtaacagacgagatagttttctctattctgaaataattagaactagaaacatgtttagaaagaaacgattatttctgaattattccaattatttgaacaaacaggaaagaagtatactatcgtcatttttttctctagatccagctactactgataatgatagaatagacgctatttatccgggtggcatacccaaaaggggtgagaatgttccagagtgtttatccagggaaattaaagaagaagttaatatagacaattcttttgtattcatagacactcggttttttattcatggcatcatagaagataccattattaataaattttttgaggtaatcttctttgtcggaagaatatctctaacgagtgatcaaatcattgatacatttaaaagtaatcatgaaatcaaggatctaatatttttagatccgaattcaggtaatggactccaatacgaaattgcaaaatatgctctagatactgcaaaacttaaatgttacggccatagaggatgttattatgaatcattaaaaaaattaactgaggatgattgattaaaaaatataaattaatttaccatcgtgtatttttataacgggattgtccggcatatcatgtagatagttaccgtctacatcgtatactcgaccatctacgcctttaaatcctctatttattgacattaatctattagaattggaataccaaatattagtaccctcaattagtttattggtaatattttttttagacgatagatcgatggctcttgaaaccaaggttttccaaccggactcattgtcgatcggtgagaagtctttttcattagcatgaatccattctaatgatgtatgtttaaacactctaaacaattggacaaattcttttgatttgctttgaatgatttcaaataggtcttcgtctacagtaggcataccattagataatctagccattataaagtgcacgtttacatatctacgttctggaggagtaagaacgtgactattgagacgaatggctcttcctactatctgacgaagagacgcctcgttccatgtcatatctaaaatgaagatatcattaattgagaaaaaactaataccctcgcctccactagaagagaatacgcatgttttaatgcattctccgttagtgtttgattcttggttaaactcagccaccgccttgattctagtatcttttgttctagatgagaactctatattagagataccaaagactttgaaatatagtaataagatttctattcctgactgattaacaaatggttcaaagactagacatttaccatgggatgctaatattcccaaacatacatctataaatttgacgcttttctcttttaattcagtaaatagagagatatcagccgcactagcatcccctttcaatagttctccctttttaaaggtatctaatgcggatttagaaaactctctatctcttaatgaatttttaaaatcattatatagtgttgctatctcttgcgcgtattcgcccggatcacgattttgtctttcaggaaagctatcgaacgtaaacgtagtagccatacgtctcagaattctaaatgatgatatacctgtttttatttcagcgagtttagccttttgataaatttcttcttgctttttcgacatattaacgtatcgcattaatactgttttcttagcgaatgatgcagacccttctacgtcatcaaaaatagaaaactcgttattaactatatacgaacatagtcctcctagtttggagactaattctttttcatcgactagacgtttattctcaaatagcgattggtgttgtaaggatcctggtcgtagtaagttaaccaacatggtgaattcttgcacactattgacgataggtgtagccgataaacaaatcatcttatggttttttaacgcaatggtcttagataaaaaattatatactgaacgagtaggacggatcttaccatcttctttgattaatgatttagaaatgaagttatgacattcatcaataatgacgcatattctactcttggaattaatagttttgatattagtaaaaaatttatttctaaaattttgatcatcgtaattaataaaaatacaatccttcgttatctctggagcgtatctgagtatagtgttcatccaaggatcttctatcaaagcctttttcaccaataagataatagcccaattcgtataaatatccttaagatgtttgagaatatatacagtagtcattgttttaccgacacccgtttcatggaacaataaaagagaatgcatactgtctaatcctaagaaaactcttgctacaaaatgttgataatccttgaggcgtactacgtccgaccccatcatttcaacgggcatattagtagttctgcgtaaggcataatcgatataggccgcgtgtgatttactcatttatgagtgataagtaataactatgttttaaaaatcacagcagtagtttaactagtcttctctgatgtttgttttcgatactttttgaatcagaagtcatactagaataaagcaacgagtgaacgtaatagagagcttcgtatactctattcgaaaactctaagaacttattaatgaattccgtatccactggattgtttaaaatactaaattgaacactgttcacatccttccaagaagaagacttagtgacggacttaacatgagacataaataaatccaaattttttttacaaacatcactagccaccataatggcgctatctttcaaccagctatcgcttacgcattttagcagtctaacatttttaaagagactacaatatattctcatagtatcgattacacctctaccgaataaagttggaagtttaataatacaatatttttcgtttacaaaatcaaataatggtcgaaacacgtcgaaggttaacatcttataatcgctaatgtatagattgttttcagtgagatgattattagatttaatagcatctcgttcacgtttgaacagtttattgcgtgcgctgaggtcggcaactacggcgtccgctttagtactcctcccataatactttacgctattaatctttaaaatttcatagactttatctagatcgctttctggtaacatgatatcatgtgtaaaaagttttaacatgtcggtcggcattctatttagatcattaactctagaaatctgaagaaagtaattagctccgtattccagactaggtaatgggcttttacctagagacagattaagttctggcaatgtttcataaaatggaagaaggacatgcgttccctcccggatattttttacaatttcatccatttacaactctatagtttgttttcattattattagttattatctcccataatcttggtaatacttaccccttgatcgtaagataccttatacaggtcattacatacaactaccaattgtttttgtacataatagattggatggttgacatccatggtggaataaactactcgaacagatagtttatctttccccctagatacattagccgtaatagttgtcggcctaaagaatatctttggtgtaaagttaaaagttagggttcttgttccattattgctttttgtcagtagttcattataaattctcgagatgggtccgttctctgaatatagaacatcatttccaaatctaacttctagtctagaaataatatcggtcttattcttaaaatctattcccttgatgaagggatcgttaatgaacaaatccttggcctttgattcggctgatctattatctccgttatagacgttacgttgactagtccaaagacttacaggaatagatgtatcgatgatgttgatactatgtgatatgtgagcaaagattgttctcttagtggcatcactatatgttccagtaatggcggaaaactttttagaaatgttatatataaaagaattttttcgtgttccaaacattagcagattagtatgaagataaacactcatattatcaggaacattatcaatttttacatacacatcagcatcttgaatagaaacgataccatcttctggaacctctacgatctcggcagactccggataaccagtcggtgggccatcgctaacaataactagatcatccaacaatctactcacatatgcatctatataatctttttcatcttgtgagtaccctggatacgaaataaatttattatccgtatttccataataaggtttagtataaacagagagagatgttgccgcatgaacttcagttacagtcgccgttggttggtttatttgacctattactctcctaggtttctctataaacgatggtttaatttgtacattcttaaccatatatccaataaagctcaattcaggaacataaacaaattctttgttgaacgtttcaaagtcgaacgaagagtcacgaataacgatatcggatactggattgaaggttaccgttacggtaatttttgaatcggatagtttaagactgctgaatgtatcttccacatcaaacggagttttaatataaacgtatactgtagatggttctttaatagtgtcattaggagttaggccaatagaaatatcattaagttcactagaatatccagagtgtttcaaagcaattgtattattgatacaattattatataattcttcgccctcaatttcccaaataacaccgttacacgaagagatagatacgtgattaatacatttatatccaacatatggtacgtaactgaatcttcccatacctttaacttctggaagttccaaactcagaaccaaatgattaagcgcagtaatatactgatccctaatttcgaagctagcgatagcctgattgtctggaccatcgtttgtcataactccggatagagaaatatattgcggcatatacaaagttggaatttgactatcgactgcgaagacattagaccgtttaatagagtcatccccaccgatcaaagaattaatgatagtattattcattttctatttaaaatggaaaaagcttacaataaactccgtagagaaatatctataatttgtgagttttccttaaagtaacagcttccgtaaacgccgtctttatctcttagtaggtttattgtatttatgaccttttccttatcttcatagaatactaaaggcaacaaagaaatttttggttcttctctaagagctacgtgagacttaaccatagaagccaacgaatccctacatattttagaacagaaataccctacttcaccacccttgtatgtctcaatactaataggtctaaaaaccaaatcttgattacaaaaccaacacttatcaattacactatttgtcttaatagacacatctgccatagatttataatactttggtagtatacaagcgagtgcttcttctttagcgggcttaaagactgctttaggtgctgaaataaccacatctggaaggcttactcgcttagccatttaattacggaactatttttttatacttctaatgagcaagtagaaaacctctcatctacaaaaacgtactcgtgtccataatcctctaccatagttacacgttttttagatctcatatgtgctaaaaagttttcccatactaattggttactattatttttcgtataatttttaacagtttgaggttttagatttttagttacagaagtgatatcgaatattttatccaaaaagaatgaataattaattgtcttagaaggagtgttttcttggcaaaagaataccaagtgcttaaatatttctactacttcattaatcttttctgtactcagattcagtttctcatcttttacttgattgattatttcaaagactaacttataatcctttttatttattctctcgttagccttaagaaaactagatacaaaatttgcatctacatcatccgtggatatttgatttttttccatgatatccaagagttccgagataatttctccagaacattgatgagacaataatctccgcaatacatttctcaaatgaataagtttattagacacgtggaagtttgactttttttgtacctttgtacatttttgaaataccgactcgcaaaaaatacaatattcatatccttgttcagatactataccgttatgtctacaaccgctacataatcgtagattcatgttaacactctacgtatctcgtcgtccaatattttatataaaaacattttatttctagacgttgccagaaaatcctgtaatatttttagttttttgggctgtgaataaagtatcgccctaatattgttaccgtcttccgccaatatagtagttaaattatccgcacatgcagaagaacaccgcttaggcggattcagtacaatgttatatttttcgtaccaactcatttaaatatcataatctaaaatagttctgtaatatgtctagcgctaatatattgatcataatcctgtgcataaattaagatacaacaatgtctcgaaatcatcgacatggcttcttccatagttagaagatcgtcgtcaaagttagcaacgtgattcatcaacatttgctgttttgaggcagcaaatactgaaccgtcgccattcaaccattcataaaaaccatcgtctgaatccattgataatttcttgtactggtttttgagagctcgcatcaatctagcatttctagctcccggattgaaaacagaaagaggatcgtacatccagggtccattttctgtaaatagaatcgtataatgtcccttcaagaagatatcagacgatccacaatcaaagaattggtctccgagtttgtaacaaactgcggactttaacctatacatgataccgtttagcataatttctggtgatacgtcaatcggagtatcatctattagagatctaaagccggtgtaacattctccaccaaacatattcttattctgacgtcgttctacataaaacatcattgctccattaacgataacaggggaatgaacagcactacccatcacattagttcccaatggatcaatgtgtgtaactccagaacatcttccatagcctatgttaggaggagcgaacaccactcttccactattgccatcgaatgccatagaataaatatccttggaattgatagaaatcggactgtcggatgttgtgatcatcttcataggattaacaactatgtatggtgccgcctgaagtttcatatcgtaactgatgccgtttataggtctagccacagaaaccaacgtaggtctaaatccaactatagacaaaatagaagccaatatctgttcctcatctgtcataacttgagagcatccagtatgaataatcttcattagatggggatctaccgcatcatcatcgttacaataaaaaattcccattctaatgttcataattgcttttctaatcatggtatgcatgtttgctctctgaatctctgtggaaattagatctgatacacctgtaatcactatcggattatcctccgtaagacgattaaccaacaacatataattataagactttacttttctaaattcataaagttgctggattaggctataggtgtctccatgtacatacgcgttctcgagcgcaggaagtttaataccgaatagtgccatcagaataggatgaatatagtaattagtttctggttttctataaataaaagacaaatcttgtgaactagacatatcggtaaaatgcatggattggaatcgtgtagtcgacagaagaatatgatgattagatggagagtatattttatctaactctttgagttggtcaccgattctaggactagctcgagaatgaataagtactaaaggatgagtacatttcacagaaacactagcattgttcaatgtgctctttacatgggtaaggagttgaaatagctcgtttctatttgttctgacaatatttagtttattcataatgttaagcatatcctgaatagtaaagttagatgtgtcatacttgttagtagttagatatttagcaattgcattcccatcatttctcaatctcgtactccaatcatgcgtggatgctacttcgtcgatggaaaccatacaatcctttttgataggctgttgagattgatcatttcctgcacgtttaggtttggtacgttgatttctagcccctgcggatataaagtcatcgtctacaatttgggacaatgaattgcatacactacaagacaaagatttatcagaagtgtgaatatgatcttcatctaccaaagaaagagtttgattagtataactagattttagtcctgcgttagatgttaaaaaaacatcgctattgaccacggcttccattatttatattcgtagtttttactcgaaagcgtgattttaatatccaatcttattacttttggaatcgttcaaaacctttgactagttgtagaatttgatctattgccctacgcgtatactcccttgcatcatatacgttcgtcaccagatcgtttgtttcggcctgaagttggtgcatatctctttcaacattcgacatgagatccttaagggccatatcgtctagattttgttgagatgctgctcctggatttggattttgttgtgctgttgtacatactgtaccaccagtaggtgtaggagtacatacagtggccacaataggaggttgagaaagtgtaaccgttggagtagtacaagaaatacttccatccgattgttgtgtacatgtagttgttggtaacgtctgagaaggttgggtagatggcggcgtcgtcgttttttgatctttattaaatttagagataatatcctgaacagcattgctcggcgtcaacgctggaaggagtgaactcgccggcgcatcagtatcttcagacagccaatcaaaaagattagacatatcagatgatgtattagtttgttgtcgtggttttggtgtaggagcagtactactaggtagaagaataggagccgatgtagctgttggaaccggctgtggagttatatgaatagttggttgtagcggttggataggctgtctgctggcggccatcatattatctctagctagttgttctcgcaactgtctttgataatacgactcttgagactttagtcctatttcaatcgcttcatcctttttcgtatccggatccttttcttcagaataatagattgacgactttggtgtagaggattctgccagcctctgtgagaacttgttaaagaagtccatttaaggctttaaaattgaattgcgattataagattaaatggcagacacagacgatattatcgactatgaatccgatgatctcaccgaatacgaggatgatgaagaagaggaagaagatggagagtcactagaaactagtgatatagatcccaaatcttcttataagattgtagaatcagcatccactcatatagaagatgcgcattccaatcttaaacatatagggaatcatatatctgctcttaaacgacgctatactagacgtataagtctatttgaaatagcgggtataatagcagaaagctataacttgcttcaacgaggaagattacctctagtttcagaattttctgacgaaacgatgaagcaaaatatgctacatgtaattatacaagagatagaggagggttcttgtcctatagtcatcgaaaagaacggagaattgttgtcggtaaacgattttgacaaagatggtctaaaattccatctagactatattatcaaaatttggaaacttcaaaaacgatattagaatttatacgaatatcgttctctaaatgtcacaatcaagtctcgcatgttcagcaatttattgtcgtactttatatcgtgttcattaacgatatcttgcaaaatagtaatgattctatcttccttcgatagatattcttcagagattattgtcttatattctttcttgttatcagatatgaatttgataagactttgaacattattgatacccgtctgtttaattttttctacagatattttagttttggcagattctatcgtatctgtcaatagacatccaacatcgacattcgacgtcaattgtctataaatcaacgtataaattttagaaataacattagcgaattgttgtgcgttgatgtcgttattctgaaacagtatgattttaggtagcattttcttaacaaagagaacgtatttattgttactcagttgaacagatgatatatccagattactaacgcatctgattccgtataccaaactttcagaagaaatggtatacaattgtttgtattcattcaatgtctctttttcagaaattagtttagagtcgaatactgcaataattttcaagagatagttttcatcagataagattttatttagtgtagatatgataaaactattgttttgttggagaacttgatacgccgcgttctctgtagtcgacgctctcaaatgggaaacaatctccattatttttttggaatcggatactatatcttcggtatcttgacgcagtctagtatacatagagttaagagagattagagtttgtacattaagcaacatgtctctaaatgtggctacaaacttttcctttttcacatcatctagtttattatataccgatttcacaacggcaccagatttaaggaaccagaatgaaaaactctgataactacaatatttcatcatagttacgattttatcatcttctatagttggtgtaatagcgcatacctttttctccaagactggaaccaacgtcataaaaatgtttaaatcaaaatccatatcaacatctgatgcgctaagaccagtctcgcgttcaagattatctttactaatggtgacgaactcatcgtataaaactctaagtttgtccattatttatttacagatttagttgtttaatttatttgtgctcttccagagttgggatagtatttttctaacgtcggtattatattattaggatctacgttcatatgtatcataatattaatcatccacgttttgataaatctatctttagcttctgaaataacgtatttaaacaaaggagaaaaatatttagctacggcatcagacgcaataacattttttgtaaatgtaacgtatttagacgacagatcttcgttaaaaagttttccatctatgtagaatccatcggttgttaacaccattcccgcgtcagattgaataggagtttgaatagtttgttttggaaatagatccttcaataacttatagttgggtgggaaaaaatcgattttatcactagactctttcttttttactatcattacctcatgaactatttcttgaatgagtatatgtattttctttcctatatcggacgcgttcattggaaaatataccatgtcgttaactataagaatatttttatcctcgtttacaaactgaataatatcagatgtagttcgtaaacgaactatatcatcaccagcacaacatctaactatatgatatccactagtttcctttagccgtttattatcttgttccatattagcagtcattccatcatttaagaaggcgtcaaaaataatagggagaaatgacattttggattctgttacaactttaccaaaattaaggatatacggacttactatctttttctcaacgtcaatttgatgaacacacgatgaaaatgtgcttctatgagattgatcatgtagaaaacaacaagggatacaatatttccgcatatcatgaaatatattaagaaatcccaccttattatatttccccaaaggatccatgcacgtaaacattatgccgttatcattaataaagacttctttctcatcggatctgtaaaagttgttactgatttttttcattccaggatctagataattaataatgatgggttttctattcttattctttgtattttggcatatcctagaccagtaaacagtttccactttggtaaaatcagcagacttttgaacgctattaaacatggcattaatggcaataactaaaaatgtaaaatatttttctatgttaggaatatggtttttcactttaatagatatatggtttttggccaaaatgatagatatttttttatccgaggatagtaaaatattattagtcgccgtctctataaaaatgaagctagtctcgatatccaattttattctagaattgataggagtcgccaaatgtaccttatacgttatatctcccttgatgcgttccatttgtgtatctatatcggacacaagatctgtaaatagttttacgttattaatcatcacggtatcgccgtcgctagataacgctaatgtaccatccaagtcccaaatggagagatttaactgttcatcgtttagaataaaatgattaccggtcatattaataaagtgttcatcgtatctagataacaacgacttataattaatgtccaagtcttgaactcgctgaatgatcttttttaacccagttagttttagattggtacgaaatatattgttaaactttgattctacagtaatgtccaaatctagttgtggaaatacttccatcaacattgtttcaaacttgataatattattatctacatcttcgtacgatccaaattccggaatagatgtatcgcacgctctggccacccagataaccaaaaagtcacacgctccaggatatacattgtataaaaagctatcgttttttagtagggtttttttctgcgtgtatacgaagggattaaaaatagtattatcaacgtaactatattccaaattattcttatgagaatagataataatatcgtccttaatatctaacaaatttcctaaatatccctttaattgagtcattcgaagcgtcaatagaatatgtctcttaactatttccggctgttgtatatttaaatgacttcgtaaaaaataatatatgggcgacttctcatctatgtaatcatatggagtgagatatagggctcgttctacctcctgccccttacccacctgtaataccaattgcggacttactatatatcgcatatttatatcgtggggtaaagtgaaaatctactaccgatgatgtaagtcttacaatgttcgaaccagtaccagatcttaatttggaggcctccgtagaactaggggaggtaaatatagatcaaacaacacctatgataaaggagaatagcggttttatatcccgcagtagacgtctattcgcccatagatctaaggatgatgagagaaaactagcactacgattctttttacaaagactttattttttagatcatagagagattcattatttgttcagatgcgttgacgctgtaaaagacgtcactattaccaaaaaaaataacattatcgtggcgccttatatagcacttttaactatcgcatcaaaaggatgcaaacttacagaaacaatgattgaagcattctttccagaactatataatgaacatagtaagaaatttaaattcaactctcaagtatccatcatccaagaaaaactcggataccagtttggaaactatcacgtttatgattttgaaccgtattactctacagtagctctggctattcgagatgaacattcatctggcatttttaatatccgtcaagagagttatctggtaagttcattatctgaaataacatatagattttatctaattaatctaaaatctgatcttgttcaatggagtgctagtacgggcgctgtaattaatcaaatggtaaatactgtattgattacagtgtatgaaaagttacaactggtcatagaaaatgattcacaatttacatgttcattggctgtggaatcaaaacttccaataaaattacttaaagatagaaatgaattatttacaaaattcattaacgagttaaaaaagaccagttcattcaagataagcaaacgcgataaggatacgctactaaaatattttacttaggactggagttagaatttatagacgactcatttcgtttatcattgttactattattactattactatcattattagtgttggcattattagtattcttcttgtcatcttgttcagaaatatacagcaatgctatacctaatactaaatacattatcatgctcgcaatggctctaacaacaacgaaccaaaatgaatttggtcgtagcttttgttcacaaaaatacataaagaaatgtctacataaatctatggcgccattggctacttgaaatagcgccagtcctcctacagattttaatatagctgtataacatgacatttattcatcatcaaaagagacagagtcaccatctgtcatatttagattttttttcatgtgttcaaagtatcctctactcatttcattataatagtttatcatacttagaattttaggacggatcaatgagtaagacttgactagatcgtcagtagtaatttgtgcatcgtctattctgcatccgcttcgtcgaataatgtatagcatcgctttgagattctccatagctatcaagtctttatacaatgacatggaaatatctgtgaatactttatacttctccaacatcgatgccttaacatcatcgcctactttagcattgaaaatacgttctattgtgtagatggatgtagcaagatttttaaacaacaatgccatcttacacgatgattgcctcaagtctccaatcgtttgtttagaacgattagctacagagtccaatgcttggctgactagcatattattatctttagaaattgtattcttcaatgaggcgtttatcatatctgtgatttcgttagtcatattacagtctgactgggttgtaatgttatccaacatatcacctatggatacggtacacgtaccagcatttgtaataatcctatctaagatgttgtatggcattgcgcagaaaatatcttctcctgtaatatctccactctcgataaatctactcagattattcttaaatgccttattctctggagaaaagatatcagtgtccatcatttcattaatagtatacgcagaaaagataccacgagtatcaattctatccaagatacttatcggttccgagtcacagataatggtttcctctccttcgggagatcctgcatagaaatatctaggacaatagtttctatactgtctgtaactctgataatctctaaagtcactaactgataccatgaaattgagaagatcaaacgctgaagtaattaatttttctgcctcgtttttactacaactagttttcatcaatgtagtgacgatgtattgtttagttacttttggtctaatactgatgatagagatattattgcttcccataatggatcttctagtagtcaccttaaagcccattgatgcgaatagcagatagataaagtcttggtatgactcctttctaatatagtacggactacctttgtcacccaactttatacccacataagccataacaacctctttaatagccgtttcatgaggtttatcagccatgagcctgagtagttggaagaatctcatgaatcccgtctcagaaagtcctatatgcatgatagatttatctttcctgggaaactctcgtatagtcatagatgaaatactctttaaagtttctgaaataagattagtaacagtcttacctccgactactctaggtaacaaacaaactctaataggtgttttctctgcggagataatatcagaaaggatagagcaataagtagtattattgtgattataaagaccgaatacataacaggtagaatttataaacatcatgtcctgaaggtttttagacttgtattcctcgtaatccataccgtcccaaaacatggatttggtaactttgatagccgtagatctttgttccttcgccaacaggttaaagaaattaataaagaatttgttgtttctatttatgtccacaaattgcacgtttggaagcgccacggttacattcactgcagcattttgaggatcgcgagtatgaagtacgatgttattgtttactggtatatctggaaagaaatctaccagtctaggaataagagattgatatcgcatagaaatagtaaagtttataatctcatcatcgaagagcattttgttaccattgtaataaatatccactctgtcatatgtataaatgaagtactgttcaaacatgatgagatgtttatatgttggcatagtagtgagatcgacgtttggtaatggcaatgtattaagattaactccataatgtctagcagcatctgcgatgttataagcgtcgtcaaagcggggtcgatcttgtattgttatatattgtctaacacctataagattatcaaaatcttgtctgcttaatacaccgttaacaatttttgccttgaattcttttattggtgcattaataacatccttatagaggatgttaaacaaataagtgttatcaaagttaagatctggatatttcttttctgctagaacatccattgagtcggagccatctggtttaatataaccaccgataaatctagctctgtattctgtatccgtcaatctaatattaagaaggtgttgagtgaaaggtggaagatcgtaaaagctgtgagtattaatgataggattagtttccgaactaatgttaattggggtattaataatatctatatttccagcgttaagtgtaacattaaacagttttaattcacgtgacgtggtatcaattaaataattaatgcccaatttggatatagcagcctgaagctcatcttgtttagttacggatcctaatgagttattaagcaatatatcgaacggatgaacgaaggttgttttaagttggtcacatactttgtaatctagacatagatgcggaagaacggtagaaactatacgaaataaatattcagagtcctctaattgatcaagagtaactattgacttaataggcatcatttatttagtattaaatgacgaccgtaccagtgacggatatacaaaacgatttaattacagagttttcagaagataattatccatctaacaaaaattatgaaataactcttcgtcaaatgtctattctaactcacgttaacaacgtggtagatagagaacataatgccgccgtagtgtcatctccagaggaaatatcctcacaacttaatgaagatctatttccagatgatgattcaccggccactattatcgaacgagtacaacctcatactactattattgacgatactccacctcctacgtttcgtagagagttattaatatcggaacaacgtcaacaacgagaaaaaagatttaatattacagtatcgaaaaatgctgaagcaataatggaatctagatctatgataacttctatgccaacacaaacaccatccttgggagtagtttatgataaagataaaagaattcagatgttagaggatgaagtggttaatcttagaaatcaacgatctaatacaaaatcatctgataatttagataattttaccaaaatactatttggtaagactccgtacaaatcaacagaagttaataagcgtatagccatcgttaattatgcaaatttgaacgggtcccccttatcagtcgaggacttggatgtttgttcggaggatgaaatagatagaatctataaaacgattaaacaatatcacgaaagtagaaaacgaaaaattatcgtcactaacgtgattattattgtcataaacattatcgagcaggcattgctaaaactcggatttgaagaaatcaaaggactgagtaccgatatcacttcagaaattatcgatgtggagatcggagatgactgcgatgctgtagcatctaaactaggaatcggtaacagtccggttcttaatattgtattgtttatactcaagatattcgttaaacgaattaaaattatttaatttaatacattcccatatccagacaacaatcgtctggattaatctgttcctgtcgtctcataccggacgacatattaatctttttattagtgggcatctttttagatggtttctttttcccagcattaactgagtcgatacctagaagatcgtgattgatctctccgaccattccacgaacttctaattggccgtctctgacggtaccataaactattttaccagcattagtaacagcttggacaatctgaccatccatcgcattgtacgatgtagtagtaactgttgttctacgtctaggagcaccagaagtatttttggagcccttggatgttgatgtagaagaagacgaggattttgattttggtttacatgtaatacattttgaactctttgattttgtatcacatgcgccggcagtcacatctgtttgagaattaagattattgttgcctcctttgacggctgcatctccaccgatttgcgctagtagatttttaagctgtggtgtaatcttattaactgtttcgatataatcatcgtaactgcttctaacggctaaattttttttatccgccatttagaagctaaaaatatttttatttatgcagaagatttaactagattatacaatgaactaatatgatccttttccagattatttacaaacttggtattttttggttctggaggaggcgaatttaaattcggacttggattcggattttgtaagttcttgatcttattatacatcgagtataggatggcgacagtaactgctacacaaataccgatcaaaagaagaataccaatcatttattgacaataacttcactattgatcaagtatgcaatatatcatcttttcactaaataagtagtaataatgattcaacaatgtcgagatatatggacgataataatttagttcatggaaatatcgctatgattggtgtgaatgactccgctaactctgtggggtgcgcagtgctttccccacatagaataaattagcattccgactgtgataataataccaagtataaacgccataatactcaatactttccatgtacgagtgggactggtagacttactaaagtcaataaaggcgaagatacacgaaagaatcaaaagaatgattccagcgattagcacgccggaaaaataatttccaatcataagcatcatgtccatttaactaataaaaattttaaatcgccgaatgaacaaagtggaatataaaccatataaaaacaatagtttgtactgcaaaaataatatctatttttgttttcgaagatatggtaaaattaaatagtagtacacagcatgttataactaacagcagcaacggctcgtaattacttatcatttactagacgaaaaggtggtgggatattttcttgctcaaataatacgaatatatcacccatccattttatgcgatgtttatatactctaatctttaatagatctatagacgacgggtttaccaacaatatagattttatcgattcatctaatttaaacccttccttaaacgtgaatgatctattatctggcataacgatgaccctacctgatgaatcggacaatgtactgggccatgtagaataaattatcaacgaattatcgtctacgaacatttatatcatttgttttaattttaggacgcgaataaatggatataaaatagaaaataacagatattacaaccagtgttatggccgcgcccaaccaggtaggcagttttattttatcttttactacaggttctcctggatgtacgtcaccaacggcggacgtagttctagtacaattagacgtaagttccgcttgggaattttttaacgctaaagagttaacgttaatcgtgcacccaacgtatttacatctagttcgttgaacatcttgattataatataaccattttctatctctagattcgtcagtgcactcatgtaaccaacataccctaggtcctaaatatttatctccggaattagattttggataattcgcgcaccaacaatttctatttcctttatgatcgttacaaaagacgtataatgccgtatccccaaaagtaaaataatcaggacgaataattctaataaactcagaacaatatctcgcatccatatgtttggagcaaatatcggaataagtagacatagccggtttccgttttgcacgtaaccattctaaacaattggggtttccaggatcgtttctacaaaatccagtcatgaaatcgtcacaatgttctgtcttgtaattattattaaatatttttggacagtgtttggtatttgtcttagaacaacattttgccacgctatcactatcgcccaggagataatccttttttataaaatgacatcgttgcccggatgctatataatcagtagcgtgttttaaatccttaatatattcaggagttacctcgttctgataatagattaatgatccaggacgaaatttgaaagaactacatggttctccatgaattaatacatattgtttagcaaattcaggaactataaaactactacaatgatctatcgacataccatctatcaaacaaaacttgggtttaatttctcccggagatgtttcataatagtacgtataactttcttctgcaaacttaacagctctattatattcaggataattaaaacctaattccatatatttgtctcgtatatctgctattcctggtgctattttgattctattaagagtaacagctgcccccattcttaataatcgtcagtatttaaactgttaaatgttggtatatcaacatctaccttatttcccgcagtataaggtttgttgcaggtatactgttcaggaatggttacatttatacttcttctatagtcctgtctttcgatgttcatcacatatgcaaagaacagaataaacaaaataatgtaagaaataatattaaatatctgtgaattcgtaaatacattgattgccataataattacagcagctacaatacacacaatagacattcccacagtgttgccattacctccacgatacatttgagttactaagcaataggtaataactaagctagtaagaggcaatagaaaagatgagataaatatcatcaatatagagattagaggagggctatatagagccaagacgaacaaaatcaaaccgagtaacgttctaacatcattatttttgaagattcccaaataatcattcattcctccataatcgttttgcatcatacctccatctttaggcataaacgattgctgctgttcctctgtaaataaatctttatcaagcactccagcacccgcagagaagtcgtcaagcatattgtaatatcttaaataactcatttatatattaaaaaatgtcactattaaagatggagtataatctttatgccgaactaaaaaaaatgacttgtggtcaacccctaagtctttttaacgaagacggggatttcgtagaagttgaaccgggatcatcctttaagtttctgatacctaagggattttacgcctctccttccgtaaagacgagtctagtattcgagacattaacaacgaccgataataaaatcactagtatcaatccaacaaatgcgccaaagttatatcctcttcaacgcaaagtcgtatctgaagtagtttctaatatgaggaaaatgatcgaatcaaaacgtcctctatacatcactcttcacttggcgtgtggatttggtaagactattaccacgtgttatcttatggctacacacggtagaaaaaccgtcatttgcgtacccaataaaatgttaatacatcaatggaagacacaggtagaggcagtcggattggaacataagatatccatagatggagtaagtagtctattaaaggaactaaagactcaaagtccggatgtattaatagtagtcagtagacatctgacaaacgatgccttttgtaaatatatcaataagcattatgatttgttcatcttggatgaatcacatacgtataatctgatgaacaatacagcagttacaagatttttagcgtattatcctccgatgatgtgttattttttaactgctacacctagaccatctaaccgaatttattgtaacagtattattaatattgccaagttatccaatctaaaaaaaactatctatgcagtagatagtttttttgagccatattccacagataatattagacatatggtaaaacgactagatggaccatctaataaatatcatatatataccgagaagttattatctgtagacgagcctagaaatcaacttattcttgataccctggtagaagaattcaagtcaggaactattaatcgcattttagttattactaaactacgtgaacatatggtattattctacaaacgattattagattttttcggaccagaggttgtatttataggagacgcccaaaatagacgtactccagatatggtcaaatcaatcaaggaactaaatagatttatattcgtatccaccttattttattccggtactggtttagatattcctagtttggattcgttgttcatttgctcggcagtaatcaacaatatgcaaatagagcaattactagggagggtatgtcgagaaacagaactattagataggacggtatatgtatttcctaacacatccatcaaagaaataaagtacatgataggaaatttcatgcaacgaattattagtctgtctgtagataaactaggatttaaacaaaaaagttatcggaaacatcaagaatccgatcccacttctgcatgtacaacatcatccagagaagaacgtgtattaaatagaatatttaactcgcaaaatcgttaagaagtttaagcgacgatccgcatgctgcgcaggccagtgtattacccctcatagtattaatataatccaatgatacttttgtgatgtcggaaatcttaaccaatttagactgacaggcagaacacgtcatgcaatcatcatcgtcatcgataactgtagtcttgggcttctttttgcgactcttcattccggaacgcacattggtgctatccatttaggtagtaaaaaataagtcagaatatgccctataacacgatcgtgcaaaacctggtatatcgtctctatctttatcacaatatagtgtatcgacatttttattattattgacctcgtttatcttggaacatggaatgggaacatttttgttatcaacggccatctttgccttaattccagatgttgtaaaattataactaaacagtctatcatcgacacaaatgaaattcttgtttagacgtttgtagtttacgtatgcggctcgttcgcgtctcattttttcagatattgcaggtactataatattaaaaataagaatgaaataacataggattaaaaataaagttatcatgacttctagcgctgatttaactaacttaaaagaattacttagtctgtacaaaagtttgagattttcagattctgcggctatagaaaagtataattctttggtagaatggggaacatctacttactggaaaataggcgtgcaaaaggtagctaatgtcgagacgtcaatatctgattattatgatgaggtaaaaaataaaccgtttaatattgatccgggctattacattttcttaccggtatattttgggagcgtctttatttattcgaagggtaaaaatatggtagaacttggatctggaaactcttttcaaataccagatgatatgcgaagtgcgtgtaacaaagtattagacagcgataacggaatagactttctgagatttgttttgttaaacaatagatggataatggaagatgctatatcaaaatatcagtctccagttaatatatttaaactagctagtgagtacggattaaacatacccaaatatttagaaattgaaatagaggaagacacattatttgacgacgagttatactctattatagaacgctctttcgatgataaatttccaaaaatatccatatcgtatattaagttgggagaacttagacggcaagttgtagactttttcaaattctcattcatgtatattgagtccatcaaggtagatcgtataggagataatatttttattcctagcgttataacaaaatcaggaaaaaagatattagtaaaagatgtagaccatttaatacgatccaaggttagagaacatacatttgtaaaagtaaaaaagaaaaacacattttccattttatacgactatgatggaaacggaacagaaactagaggagaagtaataaaacgaattatagacactataggacgagactattatgttaacggaaagtatttctctaaggttggtagtgcaggcttaaagcaattgactaataaattagatattaatgagtgcgcaactgtcgatgagttagttgatgagattaataaatccggaactgtaaaacgaaaaataaaaaaccaatcagcatttgatttaagcagagaatgtttgggatatccagaagcggattttataacgttagttaataacatgcggttcaaaatagaaaattgtaaggttgtaaatttcaatattgaaaatactaattgtttaaataacccgagtattgaaactatatatggaaactttaaccagttcgtctcaatctttaatgtcgtcaccgatgtcaaaaaaagattattcgagtgaaataatatgcgcctttgatataggtgcaaaaaatcctgccagaactgttttagaagtcaaggataactccgttagggtattggatatatcaaaattagactggagttctgattgggaaaggcgcatagctaaagatttgtcacaatatgaatacactacagttcttctagaacgtcagcctagaaggtcgccgtatgttaaatttatctattttattaaaggctttttatatcatacatcggctgccaaagttatttgcgtctcgcctgtcatgtctggtaattcatatagagatcgaaaaaagagatcggtcgaagcatttcttgattggatggacacattcggattgcgagactccgttccggatagacgcaaattagacgatgtagcggatagtttcaatttggctatgagatacgtattagataaatggaatactaattatacaccttataataggtgtaaatctagaaattacataaaaaaaatgtaataacgttagtaacgccattatggataatctatttacctttctacatgaaatagaagatagatatgccagaactatttttaactttcatctaataagttgcgatgaaataggagatatatatggtcttatgaaagaacgcatttcctcagaggatatgtttgataatatagtgtataataaagatatacatcctgccattaagaaactagtgtattgcgacatccaacttactaaacacattattaatcagaatacgtatccggtatttaacgattcttcacaagtgaaatgttgtcattatttcgacataaactcagataatagcaatattagctctcgtacagtagagatatttgagagggaaaagtcatctcttgtatcatatattaaaactaccaataagaagagaaaggtcaattacggcgaaataaagaaaactgttcatggaggcactaatgcaaattacttttccggtaaaaagtctgacgagtatctgagtactacagttagatccaacattaatcaaccttggatcaaaaccatctctaagaggatgagagttgatatcattaatcactctatagtaacgcgtggaaaaagctctatattacaaactatagaaattatttttactaatagaacatgtgtgaaaatattcaaggattctactatgcacattattctatccaaggacaaggatgaaaaggggtgtatacacatgattgacaaattattctatgtctattataatttatttctgttgttcgaagatatcatccaaaacgagtactttaaagaagtagctaatgttgtaaaccacgtactcacggctacggcattagatgagaaattattcctaattaagaaaatggctgaacacgatgtttatggagttagcaatttcaaaatagggatgtttaacctgacatttattaagtcgttggatcataccgttttcccctctctgttagatgaggatagcaaaataaagttttttaaggggaaaaagctcaatattgtagcattacgatctctggaggattgtataaattacgtgactaaatccgagaatatgatagaaatgatgaaggaaagatcgactattttaaatagcatagatatagaaacggaatcggtagatcgtctaaaagaattgcttctaaaatgaaaaaaaacactaattcagaaatggatcaacgactagggtataagtttttggtgcctgatcctaaagccggagttttttatagaccgttacatttccaatatgtatcgtattctaattttatattgcatcgattgcatgaaatcttgaccgtcaagcggccactcttatcgtttaagaataatacagaacgaattatgatagaaattagcaatgttaaagtgactcctccagattactcacctataatcgcgagtattaaaggtaagagttatgacgcattagccacgttcactgtaaatatctttaaagaggtaatgaccaaagagggtatatccatcactaaaataagtagttatgagggaaaagattctcatttgataaaaattccgctactaataggatacgggaataaaaatccacttgatacagccaagtatcttgttcctaatgtcataggtggagtctttatcaataaacaatctgtcgaaaaagtaggaattaatctagtagaaaagattacaacatggccaaaatttagggttgttaagccaaactcattcactttctcgttttcctccgtatcccctcctaatgtattaccgacaagatatcgccattacaagatatctctggatatatcacaattggaagcgttgaatatatcatcgacaaagacatttataacggtcaatattgttttgctgtctcaatatttatctagagtgagtctagaattcattagacgtagtttatcatacgatatgcctccagaagttgtctatctagtaaacgcgataatagatagtgctaaacgaattactgaatctattactgactttaatattgatacatacattaatgacctggtggaagctgaacacattaaacaaaaatctcagttaacgatcaacgagttcaaatatgaaatgctgcataactttttacctcatatgaactatacacccgatcaactaaagggattttatatgatatctttactaagaaagtttctctactgtatcttccacacttctagatatccagatagagattcgatggtttgtcatcgcatcctaacgtacggcaaatattttgagacgttggcacatgatgaattagagaattacataggcaacatccgaaacgatatcatgaacaatcacaagaacagaggcacttacgcggtaaacattcatgtactaacaactcccggacttaatcacgcgttttctagcttattgagtggaaagttcaaaaagtcagacggtagttatcgaacacatcctcactattcatggatgcagaatatttctattcctaggagtgttggattttatccggatcaagtaaagatttcaaagatgttttctgtcagaaaataccatccaagtcaatatctttacttttgttcatcagacgttccggaaagaggtcctcaggtaggtttagtatctcaattgtctgtcttgagttccattacaaatatactaacgtctgagtatttggatttggaaaagaaaatttgtgagtatatcagatcatattataaagatgatataagttactttgaaacaggatttccaatcactatagaaaatgctctagtcgcatctcttaatccaaatatgatatgtgattttgtaactgactttagacgtagaaaacggatgggattcttcggtaacttggaggtaggtattactttagttagggatcacatgaatgaaattcgcattaatattggagcgggaagattagtcagaccattcttggttgtggataacggagagctcatgatggatgtgtgtccggagttagaaagcagattagacgacatgacattctctgacattcagaaagagtttccgcatgtcatcgaaatggtagatatagaacaatttacttttagtaacgtatgtgaatcggttcaaaaatttagaatgatgtcaaaggatgaaagaaagcaatacgatttatgtgactttcctgccgaatttagagatggatatgtagcatcttcattagtgggaatcaatcacaattctggacccagagctattcttggatgtgctcaagctaaacaagctatctcttgtctgagctcggatatacgaaataaaatagacaatggaattcatttgatgtatccagagaggccaatcgtgattagtaaggctttagaaacttcaaagattgcggctaattgcttcggccaacatgttactatagcattaatgtcgtacaaaggtatcaatcaagaggatggaattatcatcaaaaaacaatttattcagagaggcggtctcgatattgttacagccaagaaacatcaagtagaaattccattggaaaactttaataacaaagaaagagataggtctaacgcctattcaaaattagaaagtaatggattagttagactgaatgctttcttggaatccggagacgctatggcacgaaatatctcatcaagaactcttgaagatgattttgctagagataatcagattagcttcgatgtttccgagaaatataccgatatgtacaaatctcgcgttgaacgagtacaagtagaacttactgacaaagttaaggtacgagtattaaccatgaaagaaagaagacccattctaggagacaaatttaccactagaacgagtcaaaagggaacagtcgcgtatgtcgcggatgaaacggaacttccatacgacgaaaatggtatcacaccagatgtcattattaattctacatccatcttctctagaaaaactatatctatgttgatagaagttattttaacagccgcatattctgctaagccgtacaacaataagggagaaaaccgacctgtctgttttcctagtagtaacgaaacatccatcgatacatatatgcaattcgctaaacaatgttatgagcattcaaatccgaaattgtccgatgaagaattatcggataaaatcttttgtgaaaagattctctatgatcctgaaacggataagccttatgcatccaaagtattttttggaccaatttattacttgcgtctgaggcatttaactcaggacaaggcaaccgttagatgtagaggtaaaaagacgaagctcattagacaggcgaatgagggacgaaaacgtggaggaggtatcaagttcggagaaatggagagagactgtttaatagcgcatggtgcagccaatactattacagaagttttgaaagattcggaagaagattatcaagatgtgtatgtttgtgaaaattgtggagacatagcagcacaaatcaagggtattaatacatgtcttagatgttcaaaacttaatctctctcctctcttaacaaaaattgataccacgcacgtatctaaagtatttcttactcaaatgaacgccagaggcgtaaaagtcaaattagatttcgaacgaaggcctccttcgttttataaaccattagataaagttgatctcaagccgtcttttctggtgtaatattctagtttggtagtagatacatatcaatatcatcaaattcgagatccgaattataaaatgggcgtggattgttaactatagaatcggacgtctgatattcgaaaatctgtggagtttcaggttttggtggaggtgtaactgctacttgggatactgaagtctgatattcagaaagctgtggatgttctggttcggcatccaccgatggtgtcacatcactaatcggttcggtaacgtctgtggatggaggtgctacttctacagaacctgtagcctcagttgtcaacggagatacatttttaatgcgagaaaatgtataatttggtaatggtttcttatgtggatctgaagaagaggtaagatatctactagaaagataccgatcacgttctagttctcttttgtagaacttaactttttctttctccgcatctagttgatattccaacctcttcacgttactacgttcagattccaattcacgttcgcatgggttacctccgcagtttttacgagcgatttcacgttcagccttcatgcgtctctccctctctctatcgagtttatcagagcagtctttctgaaggcgatcgaactccataaatttctccaacgctttgattgtttccatagatttccgaagttcagcttttaggactgtgattctttttctttcgaattcacagctggatgtacaaccgtttccattaccgccatctctaagtttcttttctagatcggcaacatttcatccccatgccttttacattcctcgagtctactgtcgtcgaaatatcgttccagctccttttcgacatcaataactttagcacgttgtctctcaagctctcttttgtagttatctgattccctggcacgtttaagatcttcatgcaattgagtcagctcttaacttcctctcttgcttcttcgtcatagtacgcgcaatcactgtgagatccattgttaccacgtctacactcggcgagctcgcgtttaagagattcaatttcccgtttgtattggtccatgtttccattgctaccaccattagatttacaggctgctagttgtcgttcgagatcagaaatacgggttttcttggaattgatttcgtcgatgtacttggcatcgaaacacttattaagttctttttccaattctacgattttatttctttcgcgagtcaattccctcctgtagtaactatctgttttgtcagattcacgctctctacgtagactttcttgcaagttactaatttgttccctagcacgtccgagtttagttttatatgctgaatagagttctgattcatcctttgagcagatctctagcgatcgtttaagattcctaattctagtctttagcctatttacctcctcagaagatgttccgttaccgttgcgtttacactcgttaagctgtctatcaagatccatgattctatctctaagacgttgcatctctctttccatatcagcattgctttcattattacgtctgcagtcactcaactgtctttcaatatctgagattctatctctaagacgtcgcatctctctctgtttcggcattggtttcattattacgtttacagtcgttcaactgtctttcaagatctgatattctagattggagtctgctaatctctgtagcattttcacggcattcactcagttgtctttcaagatctgaaattttagattggagtctgctaatctctgtaagatttcctcctccgctctcgatgcagtcggtcaacttattctctagttctctaatacgcgaacgcagtgcatcaacttcttgcgtgtcttcctggttgcgtgtacattcatcgagatctctaacgcgtcgtcgttcttcctcaagttctctgcgtactacagaaagcgtgtccctatcttgttgatatttagcaatttctgattctagagtactgattttgcttacgtagttactaatagttgtcttggccttatcaagatcctccttgtatttgtcgcattccttgatatccctacgaagtctggacagttcccattcgacattacgacgtttatcgatttcagctcggagatcgtcatcgcgttgttttagccacatacgactgagttcaagttctcgttgacaagatccatctacttttccattcctaatagtatccagttccttttctagttctgaacgcatttctcgttccctatcaagcgattctctcaattctcggatagtcttcttatcaatttctaataaatctgaaccatcatctgtcccattttgaatatccctgtgttctttgatctcttttgtaagtcggtcgattctttcggttttataaacagaatccctttccaaagtcctaatcttactgagtttatcactaagttctgcattcaattcggtgagttttctcttggcttcttccaactctgttttaaactctccactatttccgcattcttcctcgcatttatctaaccattcaattagtttattaataactagttggtaatcagcgattcctatagccgttcttgtaattgtgggaacataattaggatcttctaatggattgtatggcttgatagcatcatctttatcattattagggggatggacaaccttaattggttggtcctcatctcctccagtagcgtgtggttcttcaataccagtgttagtaataggcttaggcaaatgcttgtcgtacgcgggcacttcctcatccatcaagtatttataatcgggttctacttcagaatattcttttctaagagacgcgacttcgggagttagtagaagaactctgtttctgtatctatcaacgctggaatcaatactcaagttaaggatagcgaatacctcatcgtcatcatccgtatcttctgaaacaccatcatatgacatttcatgaagtctaacgtattgataaatagaatcagatttagtattaaacagatccttaacctttttagtaaacgcatatgtatattttagatctccagatttcataatatgatcacatgccttaaatgtcagtgcttccatgatataatctggaacactaatgggtgacgaaaaagatacagcaccatatgctacgttgataaataaatctgaaccactaagtagataatgattaatgttaagaaagaggaaatattcagtgtataggtatgtcttggcgtcatatcttgtactaaacacgctaaacagtttgttaatgtgatcaatttccaatagattaattagagcagcgggaataccaacaaacatattaccacatccgtattttctatgaatatcacatatcatgttaaaaaatcttgatagaagagcgaatatctcgtctgacttaatgagtcgtagttcagcagcaacataagtcataactgtaaatagaacatactttcctgtagtgttgattctagactccacatcaacaccattattaaaaatagttttatatacatctttaatctgctctccgttaatcgtcgaacgttctagtatacggaaacactttgatttcttatctgtagttaatgacttagtgatatcacgaagaatattacgaattacatttcttgtttttcttgagagacctgattcagaactcaactcatcgttccatagtttttctacctcagtggcgaaatctttggagtgcttggtacatttttcaataaggttcgtgacctccatttattataaaaaatttattcaaaacttaactacaatcgggtaattataagatcgtagatctcccatgtggcggaatactaccatctatcgcatgtggatggacagtaggtaatggccatgggaacagtaatgtttgcatatttatctttcttgctagtattactgcatattgtcccaatgtttcgatgtgatgttctaacctatcaactgccgctgtatcacaacaatagtgtccgatgaaattaagattatgatccaatgtgtttaatatatgattatcaagtcttatacgatccgcgtcttttttgacaggatcaggttcttctacaggaagaagtttcggcctcttatgatattcatgtctgggaaacggtggtctagggtgaggctccggtatcggagtgggttttggattataatcatcatcgtctatgacatcatcttcgacttcgatatttattttgctatcttgatgatgtcctgtatcagttgcattttcagcactcgactgaatattagcgcattcattgtctattattaccatatttctaaacccaaaatgtatgtgttgaacatcagtactatcgttgatgagtcttatagcatgaattcgcttatcgttatcgggtttatcttctgtcaccttagcaattccttttttattaaactctacataatcatatccatttctattgtttgttctaatataaacgagtatagcatcattgctaaatttttcaatagtatcaaaaacagaatatcctaaaccatataatatatattcaggaacactcaaactaaatgtccaggattctcctaaatacgtaaactttaatagtgcgaaatcattcaaaaatctaccacttatagatagatagtacataaatgcgtatagtagtctacctatctctttattatgaaaaccggcattacgatcatatatgtcgtgatatacctgtgatccgtttacgttaaaccataaatacatgggtgatcctataaacatgaatttatttctaattctcagagctatagttaattgaccgtgtaatatttgcttacatgcatacttgatacgcttattaataagatttttatcattgctcgttatttcagaatcgtatatataaggagtaccatcgtgattcttaccagatattatacaaaatactatatataaaatatattgacccacgttagtaatcatataaatgtttaacgttttaaattttgtattcaatgatccattatcatacgctatcatggtcttgtaatattcattctttaaaatataatattgtgttagccattgcattggagctcctaatggagattttctattctcatccattttaggataggctttcataaagtccctaataacttcgtgaataatgtttctatgttttctactgatgcatgtatttgcttcgatttttttatcccatgtttcatctatcatagatttaaacgcagtaatgctcgcaacattaacatcttgaaccgttggtacaattccgttccataaatttataatgttcgccatttatataactcattttttgaatatacttttaattaacaaaagagttaagttactcatatggacgccgtccagtctgaacatcaatctttttagccagagatatcatagccgctcttagagtttcagcgtgattttccaacctaaatagaacttcatcgttgcgtttacaacacttttctatttgttcaaactttgttgttacattagtaatctttttttccaaattagttagccgttgtttgagagtttcctcattgtcgtcttcatcggctttaacaattgcttcgcgtttagcctctggctttttagcagcctttgtagaaaaaaattcagttgctggaattgcaagatcgtcatctccggggaaaagagttccgtccatttaaagtacagattttagaaactgacactctgcgttatttatatttggtacaacacatggattataaatattgatgttaataacatcagaaaatgtaaagtctatacattgttgcatcgtgttaaattttctaatggatctagtattattgggtccaacttctgcctgaaatccaaatatggaagcggatacaaaaccgtttcctggataaaccacacatctccacttttgctttacatcagaaattgtgtcgttgacatcttgaactctcctatctaatgccggtgttccacctatagattttgaatattcgaatgctgcatgagtagcattaaattccttaatattgccataattttcatatattgagtaaccctggataaaaagtaaacacaccgcagccgtcgctaccacaataaaaaaaattgatagagagttcatttataatctattagaagctgacaaaatttttttacacgcatcagacaatgctttaataaatagttcaacatctacttttgtcatatcgaaccgatggtatgattctaacctagaattacatccgaaaaagttgactatgttcatagtcattaagtcattaacaaacaacattccagactctggattataagacgatactgtttcgtcacaattacctaccttaatcatgtgattatgaatattggctattagagcaccttctaagaaatctataatatctttgaaacacgatttaaaatcaaaccacgaatatacttctacgaagaaagttagtttacccataggagaaataactataaatggagatctaaatacaaaatccggatctatgatagttttaacattattatattctctattaaatacctccacatctaaaaatgttaattttgaaactatgtcttcgtttattaccgtacctgaactaaacgctataagctctattgtttgagaactctttaaacgatattcttgaaatacatgtaacaaagtttcctttaactcggtcggtttatctaccatagttacagaatttgtatccttatctataatataataatcaaaatcgtataaagttatataattatcgcgttcagattgtgatcttttcaaatagactaaaaaccccatttctctagtaagtatcttatgtatatgtttgtaaaatatcttcatggtgggaatatgctctaccgcagttagccattcctcattgacagcggtagatgtattagacaaaactattccaatgtttaacaagggccattttacgagattattaaatccttgtttgataaatgtagccaatgagggttcgagttcaacgacgattgaattctcttcccgcggatgctgcatgatgaacgacgggatgttgttcgattgatttggaattctttttcgactttttgtttatattaaatattttaaaatttatagcggatagcaattcatgtaccacggataatgtagacgcgtattgcgcatcgatatctttattattagataaatttatcaataaatgtgagaagtttgcctcgttaaggtcttccatttaaatattatataaacatttgtgtttgtatcttattcgtcttttatggaatagttttttactagtaaagctgcaattacacactttgtccgtaaaacataaatataaacaccagcttttatcaatcgttccaaaaagtcgacggcggacatttttaacatggcatctattttaaatacacttaggtttttggaaaaaacatcattttataattgtaacgattcaataactaaagaaaagattaagattaaacataagggaatgtcatttgtattttataagccaaagcattctaccgttgttaaatacttgtctggaggaggtatatatcatgatgatttggttgtattggggaaggtaacaattaataatctaaagatgatgctattttacatggatttatcatatcatggagtgacaagtagtggagcaatttacaaattgggatcgtctatcgatagactttctctaaataggactattgttacaaaagttaataattatgatgatacattttttgacgacgatgattgatcgctattgcacaattttgtttttgtactttctaatatagtgtttaggttctttttcatatgagaatattgatttactaaaatatctatgtttaacttttgttctatgacgtccttatcggcggtatcggtacatatacgtaattcaccttcacaaaatacggagtcttcgataataatagccaatcgattattggatctagctgtctgtatcatattcaacatgtttaatatatcctttcgtttcccctttacaggcatcgatcgtagcatattttccgcgtctgatatggaaatgttaaaactacaaaaatgcgtaatgttagcccgtcctaatattggtacgtgtctataagtttggcatagtagaataatagacgtgtttaaatgccttccaaagtttaagaattctattagagtattgcattttgatagtttatcgcctacatcatcaaaaataagtaaaaagtgtgctgattttttatgattttgtgcgacagcaatacatttttctatgttacttttagttcgtatcagattatattctagagattcctgactactaacgaaattaatatgatttggccaaatgtatccatcataatctgggttataaacgggtgtaaacaagaatatatgtttatattttttaactagtgtagaaaacagagatagtaaatagatagtttttccagatccagatcctcctgttaaaaccattctaaacggcatttttaataaattttctcttgaaaattgtttttcttggaaacaattcataattatatttacagttactaaattaatttgataataaatcaaaatatggaaaactaaggttgttagtagggaggagaacaaagaaggcacatcgtgatataaataacatttattatcatgatgacaccagaaaacgacgaagagcagacatctgtgttctccgctactgtttacggagacaaaattcagggaaagaataaacgcaaacgcgtgattggtctatgtattagaatatctatggttatttcactactatctatgattaccatgtccgcgtttctcatagtgcgcctaaatcaatgcatgtctgctaacgaggctgctattactgacgccgctgttgccgttgctgctgcatcatctactcatagaaaggttgcgtctagcactacacaatatgatcacaaagaaagctgtaatggtttatattaccagggttcttgttatatattacattcagactaccagttattctcggatgctaaagcaaattgcactgcggaatcatcaacactacccaataaatccgatgtcttgactacctggctcattgattatgttgaggatacatggggatctgatggtaatccaattacaaaaactacatccgattatcaagattctgatgtatcacaagaagttagaaagtatttttgtgttaaaacaatgaactaatatttatttttgtacattaataaatgaaatcgcttaatagacaaactgtaagtaggtttaagaagttgtcggtgccggccgctataatgatgatactctcaaccattattagtggcataggaacatttctgcattacaaagaagaactgatgcctagtgcttgcgccaatggatggatacaatacgataaacattgttatttagatactaacattaaaatgtctacagataatgcggtttatcagtgtcgtaaattacgagctagattgcctagacctgatactagacatctgagagtattgtttagtattttttataaagattattgggtaagtttaaaaaagaccaatgataaatggttagatattaataatgataaagatatagatattagtaaattaacaaattttaaacaactaaacagtacgacggatgctgaagcgtgttatatatacaagtctggaaaactggttaaaacagtatgtaaaagtactcaatctgtactatgtgttaaaaaattctacaagtgacaacaaaaaatgaattaataataagtcgttaacgtacgccgccatggacgccgcgtttgttattactccaatgggtgtgttgactataacagatacattgtatgatgatctcgatatctcaatcatggactttataggaccatacattataggtaacataaaaactgtccaaatagatgtacgggatataaaatattccgacatgcaaaaatgctactttagctataagggtaaaatagttcctcaggattctaatgatttggctagattcaacatttatagcatttgtgccgcatacagatcaaaaaataccatcatcatagcatgcgactatgatatcatgttagatatagaagataaacatcagccattttatctattcccatctattgatgtttttaacgctacaatcatagaagcgtataacctgtatacagctggagattatcatctaatcatcaatccttcagataatctgaaaatgaaattgtcgtttaattcttcattctgcatatcagacggcaatggatggatcataattgatgggaaatgcaatagtaattttttatcataaaagttgtaaagtaaataataaaacaataaatattgaactagtagtacgtatattgagcaatcagaaatgatgctggtacctcttatcacggtgaccgtagttgcgggaacaatattagtatgttatatattatatatttgtaggaaaaagatacgtactgtctataatgacaataaaattatcatgacaaaattaaaaaagataaagagttctaattccagcaaatctagtaaatcaactgatagcgaatcagactgggaggatcactgtagtgctatggaacaaaacaatgacgtagataatatttctaggaatgagatattggacgatgatagcttcgctggtagtttaatatgggataacgaatccaatgttatggcgcctagcacagaacacatttacgatagtgttgctggaagcacgctgctaataaataatgatcgtaatgaacagactatttatcagaacactacagtagtaattaatgaaacggagactgttgaagtacttaatgaagataccaaacagaatcctaactattcatccaatcctttcgtaaattataataaaaccagtatttgtagcaagtcaaatccgtttattacagaacttaacaataaatttagtgagaataatccgtttagacgagcacatagcgatgattatcttaataagcaagaacaagatcatgaacacgatgatatagaatcatcggtcgtatcattggtgtgattagtttcctttttataaaattgaagtaatatttagtattattgctgccgtcacgttgtacaaatggagatattccctgtattcggcatttctaaaattagcaattttattgctaataatgactgtagatattatatagatacagaacatcaaaaaattatatctgatgagatcaatagacagatggatgaaacggtacttcttaccaacatcttaagcgtagaagttgtaaatgacaatgagatgtaccatcttattcctcatagattatcgacgattatactctgtattagttctgtcggaggatgtgttatctctatagataatgacatcaatggcaaaaatattctaacctttcccattgatcatgctgtaatcatatccccactgagtaaatgtgtcgtagttagcaagggtcctacaaccatattggttgttaaagcggatatacctagcaaacgattggtaacatcgtttacaaacgacatactatatgtaaacaatctgtcactgattaattatttgccgttgtctgtattcattattagacgagtcaccgactatttggatagacacatatgcgatcagatatttgctaataataagtggtattcccttataaccatcgacgataagcaatatcctattccatcaaactgtataggtatgtcctctgccaagtacataaattctagcatcgagcaagatactttaatccatgtttgtaacctcgagcatccgttcgactcagtatacaaaaaaatgcagtcgtacaattctctacctatcaaggaacaaatattgtacggtagaattgataatataaatatgagcattagtatttctgtggattaatagatttctagtatggggatcattaatcatctctaatctctaaatacctcataaaacgaaaaaaaagctattatcaaatactgtacggaatggattcattctcttctctttttatgaaactctgttgtatatctactgataaaactggaagcaaaaaatctgatagaaagaataagaataagatcaaggattatatggaacacgattattataaaataacaatagttcctggttcctcttccacgtctactagctcgtggtattatacacatgcctagtaatagtctctttgcgttgacggaaagcagactagaaataacaggctaaaatgttcagacaccataatagttcccaacccagataataacagagttccatcaacacattcctttaaactcaatcccaaacccaaaaccgttaaaatgtatccggccaattgatagtagataatgaggtgtacagcgcatgataatttacacagtaaccaaaatgaaaatactttagtaattataagaaatatagacggtaatgtcatcatcaacaatccgataatatgcctgagagtaaacattgacggataaaacaaaaatgctccgcataactctatcatggcaataacacaaccaaatacttgtaagattcctaaattagtagaaaatacaacgaatatcgatgtataagtgatctcgagaaataataagaataaagtaatgcccgtaaagataaacatcaacattgtttggtaatcattaaaccaattagtatgaagttgaactaatttcacagtagattttattccagtgttatcctcgcatgtataagtacctggtaagatatctttatattccataatcaatgagacatcactatctgataacgaatgaagtctagcactagtatgccatttacttaatattgtcgtcttggaagttttattataagttaaaatatcatggttatccaatttccatctaatatactttgtcggattatctatagtacacggaataatgatggtatcattacatgctgtatactctatggtctttgtagttgttataacaaccaacgtatagaggtatatcaacgatattctaactcttgacattttttatttatttaaaatgatacctttgttatttattttattctattttgctaacggtattgaatggcataagtttgaaacgagtgaagaaataatttctacttacttattagacgacgtattatacacgggtgttaatggggcggtatacacattttcaaataataaactaaacaaaactggtttaactaataataattatataacaacatctataaaagtagaggatgcggataaggatacattagtatgcggaaccaataacggaaatcccaaatgttggaaaatagacggttcagacgacccaaaacatagaggtagaggatacgctccttatcaaaatagcaaagtaacgataatcagtcacaacggatgtgtactatctgacataaacatatcaaaagaaggaattaaacgatggagaagatttgacggaccatgtggttatgatttattcacggcggataacgtaattccaaaagatggtttacgaggagcattcgtcgataaagacggtacttatgacaaagtttacattcttttcactgatactatcggctcaaagagaattgtcaaaattccgtatatagcacaaatgtgcctaaacgacgaaggtggtccatcatcattgtctagtcatagatggtcgacgtttctcaaagtcgaattagaatgtgatatcgacggaagaagttatagacaaattattcattctagaactataaaaacagataatgatacgatactatatgtattcttcgatagtccttattccaagtccgcattatgtacctattctatgaataccattaaacaatctttttctacgtcaaaattggaaggatatacaaagcaattgccgtctccagctcctggtatatgtttaccagctggaaaagttgttccacataccacgtttgaagtcatagaacaatataatgtactagatgatattataaagcctttatctaaccaacctatcttcgaaggaccgtctggtgttaaatggttcgatataaaggagaaggaaaatgaacatcgggaatatagaatatacttcataaaagaaaattctatatattcgttcgatacaaaatctaaacaaactcgtagctcgcaagtcgatgcgcgactattttcagtaatggtaactgcgaaaccgttatttatagcagatatagggataggagtaggaatgccacaaatgaaaaaaatacttaaaatgtaatcttaatcgagtacaccacacgacaatgaacaaacataagacagattatgctggttatgcttgctgcgtaatatgcggtctaattgtcggaattatttttacagcgacactattaaaagttgtagaacgtaaattagttcatacaccattaatagataaaacgataaaagatgcatatattagagaagattgtcctactgactggataagctataataataaatgtatccatttatctactgatcgaaaaacctgggaggaaggacgtaatgcatgcaaagctctaaattcaaattcggatctaattaagatagagactccaaacgagttaagttttttaagaagccttagacgaggctattgggtaggagaatccgaaatattaaaccagacaaccccatataattttatagctaagaatgccacgaagaatggaactaaaaaacggaaatatatttgtagcacaacgaatactcccaaactgcattcgtgttacactatataacaattacactacatttttatcataccactacttcggttagatgttttagaaaaaaataaatatcgccgtaccgttcttgtttttataaaaataacaattaacaattatcaaattttttctttaatattttacgtggttgaccattcttggtggtaaaataatctcttagtgttggaatggaatgctgtttaatgtttccacactcatcgtatattttgacgtatgtagtcacatcgtttacgcaatagtcagactgtagttctatcatgcttcctacatcagaaggaggaacagttttaaagtctcttggttttaatctattaccgttagttttcatgaaatcctttgttttatccacttcacattttaaataaatgtccactatacattcttttgttaattttactagatcgtcatgggtcatagaatttataggttccgtagtccatggatccaaactagcaaacttcgcgtatacggtatcgcgattagtgtatacaccaactgtatgaaaattaagaaaacagtttaataaatcaacagaaatatttaatcctccgtttgatacagatgcgccatatttatggatttcggattcacacgttgtttgtctgaggtgttcgtctagtgttgcttctacgtaaacttcgattcccatatattctttattgtcagaatcgcataccgatttatcatcatacactgtttgaaaactaaatggtatacacatcaaaataataaataataacgagtacattctgcaatattgttatcgtaattggaaaaatagtgttcgagtgagttggattatgtgagtattggattgtatattttattttatattttgtaataagaataaaatgctaatgtcaagtttattccaatagatgtcttattaaaaacatatataataaataacaatggctgaatggcataaaattatcgaggatatctcaaaaaataataagttcgaggatgccgccatcgttgattacaagactacaaagaatgttctagctgctattcctaacagaacatttgccaagattaatccgggtgaaattattcctctcatcactaatcgtaatattctaaaacctcttattggtcagaaatattgtattgtatatactaactctctaatggatgagaacacgtatgctatggagttgcttactgggtacgcccctgtatctccgatcgttatagcgagaactcataccgcacttatatttttgatgggtaagccaacaacatccagacgtgacgtgtatagaacgtgtagagatcacgctacccgtgtacgtgcaactggtaattaaaataaaaagtaatattcatatgtagtgtcaattttaaatgatgatgatgaaatggataatatccatattgacgatgtcaataatgccggtattggcatacagttcatcgatttttagatttcattcagaggatgtggaattatgttatgggcatttgtattttgataggatctataatgtagtaaatataaaatataatccgcatattccatatagatataattttattaatcgcacgttaaccgtagatgaactagacgataatgtcttttttacacatggttattttttaaaacacaaatatggttcacttaatcctagtttgattgtctcattatcaggaaacttaaaatataatgatatacaatgctcagtaaatgtatcgtgtctcattaaaaatttggcaacgagtacatctactatattaacatctaaacataagacttattctctacatcggtccacgtgtattactataataggatacgattctattatatggtataaagatataaatgacaagtataatgacatctatgattttactgcaatatgtatgctaatagcgtctacattgatagtgaccatatacgtgtttaaaaaaataaaaatgaactcttaattatgctatgctattagaaatggataaaatcaaaattacggttgattcaaaaattggtaatgttgttaccatatcgtataacttggaaaagataactattgatgtcacacctaaaaagaaaaaagaaaaggatgtattattagcgcaatcagttgctgtcgaagaggcaaaagatgtcaaggtagaagaaaaaaatattatcgatattgaagatgacgatgatatggatgtagaaagcgcgtaatacgatctataaaaataagtatataaatactttttatttactgtactcttactgtgtagtggtgataccctactcgattatttttttaaaaaaaaaatacttattctgattcttctagccatttccgtgttcgtttgaatgccacatcgacgtcaaagataggggagtagttgaaatctagttctgcattgttggtacgcacctcaaatgtagtgttggatatcttcaacgtatagttgttgagtagtgatggttttctaaatagaattctcttcatatcattcttgcacgcgtacatttttagcatccatcttggaatcctagatccttgttctattcccaatggtttcatcaatagaagattaaacatatcgtacgaacacgatggagagtaatcgtagcaaaagtaagcatttcctttaatcttagatcccggatactggatatattttgcagccaacacgtgcatccatgcagcatttcctacatatacccggctatgcaccgcgtcatcatcgactgtacgatacataatgttaccgtgttgcttacattgctcgtaaaagactttcatcaatttgtctccttctccgtaaattccagtgggtcttaggcaacaagtatacaattttgctccattcatgattacggaattattggctttcataaccagttgctcggccatacgtttactttttgcgtatacatgtcctggtgatatatcataaagggtatgctcatggccgatgaatggatcaccgtgtttattgggtcctattgcttccatgctactagtatagatcaaatacttgattcctaggtccacacaagctgccaaaatagtctgtgttccataatagtttactttcatgatttcattatcggtgtattttccaaatacatccactagagcagccgtatgaataatcagatttaccccatctagcgcttctctcaccttatcaaagtcgtttatatcacattgtatatagtttataaccttaactttcgaggttattggttgtggatcttctacaatatctatgactctgatttcttgaacatcatctgcactaattaacagttttactatatacctgcctagaaatccggcaccaccagtaaccgcgtacacggccattgctgccactcataatatcagactacttattctattttactaaataatggctgtttgtataatagaccacgataatatcagaggagttatttactttgaaccagtccatggaaaagataaagttttaggatcagttattggattaaaatccggaacgtatagtttgataattcatcgttacggagatattagtcaaggatgtgattccataggcagtccagaaatatttatcggtaacatctttgtaaacagatatggtgtagcatatgtttatttagatacagatgtaaatatatttacaattattggaaaggcgttatctatttcaaaaaatgatcagagattagcgtgtggagttattggtatttcttacataaatgaaaagataatacattttcttacaattaacgagaatggcgtttgatatatcagttaatgcgtctaaaacaataaatgcattagtttacttttctactcagcaaaataaattagtcatacgtaatgaagttaatgatacacactacactgtcgaatttgatagggacaaagtagttgacacgtttatttcatataatagacataatgacaccatagagataagaggggtgcttccagaggaaactaatattggttgcgcggttagtatgacttacttgtataataagtatagttttaaactgattttagcagaatatataagacacagaaatactatatccggcaatatttattcggcattgatgacactagatgatttggctattaaacagtatggagacattgatctattatttaatgagaaacttaaagtagactccgattcgggactatttgactttgtcaactttgtaaaggatatgatatgttgtgattctagaatagtagtagctctatctagtctagtatctaaacattgggaattgacaaataaaaaatataggtgtatggcattagccgaacatatatctgatagtattccaatatctgagctatctagactacgatacaatctatgtaagtatctacgcggacacactgagagcatagaggataaatttgattattttgaagacgatgattcgtctacatgttctgccgtaaccgacagggaaacggatgtataattttttttatagcgtgaaggatatgataaaaaatataattgttgtatttatcccattccaatcaccttatatgattctgtaacacaataaaggagtcttatagatgtatagaggtcagatactggtttgataaactgtttattccacataagtatgtttgactttatggttagacccgcatactttaacaaatcactgaaaattggagttaggtattgacctctcagaatcagttgccgttctggaacattaaatgtattttttatgatatactccaacgcatttatgtgggcatacaacaagtcattactaatggaatattccaagagttttagttgtctagtatttaacaagagaagagatttcaacagactgtttatgaactcgaatgccgcctcattgtcgcttatattgatgatgtcgaattctcccaatatcatcaccgatgagtagctcatcttgttatcgggatccaagttttctaaagatgtcattaaaccctcgatcatgaatggatttatcatcatcgtttttatgttggacatgagcttagtccgtttgtccacatctatagaagatgatttctgaattatttcatatatctctctctttaactccaggaacttgtcaggatggtctactttaatatgttctcgtctaagagatgaaaatctttggatggttgcacgcgacttttctctaaaggatgacgttgcccaagatcctctcttaaatgaatccatcttatccttggacaagatggacagtctattttccttagatggtttaatatttttgttacccatgatctataaaggtagacctaatcgtctcggatgaccatatatttattttcagttttattatacgcataaattgtaaaaaatatgttaggtttacgaaaatgtctcgtggggcattaatcgtttttgaaggattggacaaatctggaaaaacaacacaatgtatgaacatcatggaatcaataccttcaaacacaataaaataccttaactttcctcagagatccactgtcactggaaagatgatagatgactatctaactcgtaaaaaaacctataatgatcatatagttaatctattattttgtgcaaatagatgggagtttgcatcttttatacaagaacaactagaacagggaattactttaatagttgatagatacgcattttctggagtagcgtatgccgccgctaaaggcgcgtcaatgactctcagtaagagttatgaatctggattgcctaaacccgacttagttatattcttggaatctggtagcaaagaaattaatagaaacgtcggtgaggaaatttatgaagatgttacattccaacaaaaggtattacaagaatataaaaaaatgattgaagaaggagatattcattggcaaattatttcttctgaattcgaggaagatgtaaagaaggagttgattaagaatatagttatagaggctatacacacggttactggaccagtggggcaactgtggatgtaatagtgaaattacattttttataaatagatgttagtacagtgttataaatggatgaagcatattactctggcaacttggaatcagtactcggatacgtgtccgatatgcataccgaactcgcatcaatatctcaattagttattgccaagatagaaactatagataatgatatattaaacaaggacattgtaaattttatcatgtgtagatcaaacttggataatccatttatctctttcctagatactgtatatactattatagatcaagagaactatcagactgagttgattaattcattagacgacaatgaaattatcgattgtatagttaataagtttatgagcttttataaggataacctagaaaatatagtagatgctatcattactctaaaatatataatgaataatccagattttaaaactacgtatgccgaagtactcggttccagaatagccgatatagatattaaacaagtgatacgtaagaatatactacaattgtctaataatatccgcgaacgatatttgtgaaaatattaaaaaaaaatactttttttattaaatgacgtcttttcgtgaatttagaaaattatgctgtgctatatatcacgcatcaggatataaagaaaaatctaaattaattagagactttataacagatagggatgataaatatttgatcattaagctattgcttcccggattagacgatagaatttataacatgaacgataaacaaattataaaattatatagtataatatttaaacaatctcaggaagatatgctacaagatttaggatacggatatataggagacactattaggactttcttcaaagagaacacagaaatccgtccacgagataaaagcattttaactttagaagaagtggatagttttttaactacgttatcatccgtaactaaagaatcgcatcaaataaaattattgactgatgtagcatctgtttgtacatgtaatgatttaaaatgtgtagtcatgcttattgataaagatctaaaaattaaagcgggtcctcggtacgtacttaacgctattagtcctaatgcctatgatgtgtttagaaaatctaataacttgaaagagataatagaaaattcatctaaacaaaatctagactctatatctatttctgttatgactccaattaatcccatgttagcggaatcgtgtgattctgtcaataaggcgtttaaaaaatttccatcaggaatgtttgcggaagtcaaatacgatggtgaaagagtacaagttcataaaaataataacgagtttgccttctttagtagaaacatgaaaccagtactctctcataaagtggattatctcaaagaatacataccgaaagcatttaaaaaagctacgtctatcgtattggattctgaaattgttcttgtagacgaacataatgtaccgctcccgtttggaagtttaggtatacacaaaaagaaagaatataaaaactctaacatgtgtttgttcgtgtttgactgtttgtactttgatggattcgatatgacggacattccattgtacgaacgaagatcttttctcaaagatgttatggttgaaatacccaatagaatagtattctcagagttgacgaatattagtaacgagtctcagttaactgacgtattggatgatgcactaacgagaaaattagaaggattggtcttaaaagatattaatggagtatacgaaccgggaaagagaagatggttaaaaataaagcgagactatttgaacgagggttccatggcagattctgccgatttagtagtactaggtgcctactatggtaaaggagcaaagggtggtatcatggcagtctttctaatgggttgttacgacgatgaatccggtaaatggaagacggttaccaagtgttcaggacacgatgataatacgttaagggagttgcaagaccaattaaagatgattaaaattaacaaggatcccaaaaaaattccagagtggttagtagttaataaaatctatattcccgattttgtagtagaggatccgaaacaatctcagatatgggaaatttcaggagcagagtttacatcttccaagtcccataccgcaaatggaatatccattagatttcctagatttactaggataagagaggataaaacgtggaaagaatctactcatctaaacgatttagtaaacttgactaaatcttaatagttacatacaaactgaaaattaaaataacactatttagttggtggtcgccatggatggtgttattgtatactgtctaaacgcgctagtaaaacatggcgaggaaataaatcatataaaaaatgatttcatgattaaaccatgttgtgaaagagtttgtgaaaaagtcaagaacgttcacattggcggacaatctaaaaacaatacagtgattgcagatttgccatatatggataatgcggtatccgatgtatgcaattcactgtataaaaagaatgtatcaagaatatccagatttgctaatttgataaagatagatgacgatgacaagactcctactggtgtatataattattttaaacctaaagatgccattcctgttatcatatctataggaaaggataaagatgtctgtgaactattaatctcatcagacatatcgtgtgcatgcgtggagttaaattcatatcacgtagccattcttcccatggatgtttccttttttaccaaaggaaatgcatcattgattattctcctgtttgatttctctatcgatgcggcacctctcttaagaagtgtaaccgataataatgttattatatctagacaccagcgtctacatgacgagcttccgagttccaattggttcaagttttacataagtataaagtccgactattgttctatattatatatggttgttgatggatctgtgatgcatgcgatagctgataatagaactcacgcaattattagcaaaaatatattagacaatactacgattaacgatgagtgtagatgctgttattttgaaccacagattaggattcttgatagagatgagatgctcaatggatcatcgtgtgatatgaacagacattgtattatgatgaatttacctgatgtaggcgaatttggatctagtatgttggggaaatatgaacctgacatgattaagattgctctttcggtggctggtaatttaataagaaatcgagactacattcccgggagacgaggatatagctactacgtttacggtatagcctctagataatttttttaagcacgaaataaaaaacataattttaaaccaatctatttcatactattttgtgtgatcaccatggacataaagatagatattagtatttctggtgataaatttacggtgactactaggagggaaaatgaagaaagaaaaaaatatctacctctccaaaaagaaaaaactactgatgttatcaaacctgattatcttgagtacgatgacttgttagatagagatgagatgtttactattctagaggaatattttatgtacagaggtctattaggcctcagaataaaatatggacgactctttaacgaaattaaaaaattcgacaatgatgcggaagaacaattcggtactatagaagaactcaagcagaaacttagattaaattctgaagagggagcagataactttatagattatataaaggtacaaaaacaggatatcgtcaaacttactgtatacgattgcatatctatgataggattgtgtgcatgcgtggtagatgtttggagaaatgagaaactgttttctagatggaaatattgtttacgagcgattaaactgtttattgatgatcacatgcttgataagataaaatctatactgcagaatagactagtatatgtggaaatgtcatagaaagttaaaagttaatgagagcaaaaatatataaggttgtattccatatttgttatttttttctgtaatagttagaaaaatacattcgatggtctatctatcagattattatgtgttataaggtactttttctcataataaactagagtatgagtaagatagtgtttttcaaaacatataaatctaaaattgatggatgagatatacagctattaatttcgaaaatatattttaatctgataactttaaacatggatttttaatggtggtttaacgttttaaaaaaagattttgttattgtagtatatgataatattaaaagatggatataaagaatttgctgactgcatgtactattttttacattactacattggctacggcagatatacctacttcgtcactgccacacgctccggtaaacggggcatgtgacgagggagaatatcttgataagaggcataatcaatgttgtaatcagtgtccacctggagaatttgccaaggttagatgtaatggtaacgataacacaaaatgtgaacgctgcccacctcatacatataccgcaatccccaattactctaatggatgtcatcaatgtagaaaatgcccaacaggatcatttgataaggtaaagtgtaccggaacacagaacagtaaatgttcgtgtcttcctggttggtattgcgctactgattcttcacagactgaagattgtcgagattgtataccaaaaaggagatgtccatgcggatactttggtggaatagatgaacaaggaaatcctatttgtaaatcgtgttgtgttggtgaatattgcgactacctacgtaattatagacttgatccatttcctccatgcaaactatctaaatgtaattaattatgattttgatgataatgttaccatacattatatcgctacttggttagtgtattattcagtatgaagacctattaataattacttatcttttgacgatcttgttataattataatataaaaatacttatggcatagtaactcataattgctgacgcgataaattcgtaataatctgttttgttcaaatttttataaggaatctacaggcataaaaataaaaatataatttataatatactcttacagcgcgccatcatgaataacagcagtgaattgattgctgttattaatggatttagaaatagtggacgattttgtgatattaatatagttattaatgatgaaaggataaacgctcacagactcatcctatctggagcctccgaatatttttccattctgttttccaataattttatcgattctaatgaatacgaagttaatctaagtcatttagattatcaaagtgttaacgatttgatcgattacatttatgggatacctttgagcctaactaacgataacgtgaaatatattctttcaaccgctgattttttacaaattggatctgctattacggagtgtgaaaattacatacttaaaaatctttgttctagaaactgtatcgatttctacatatacgctgataaatataataacaagaaaatagaatcagcgtcgtttaacacaatattacaaaatattttgagactcatcaacgatgaaaactttaaatacttaacagaggaatcaatgataaaaattttaagcgatgatatgttaaatataaaaaatgaggatttcgccccactaattctcattaaatggttagagagtactcaacaaccatgcaccgtcgagttacttaaatgcctcagaatatcattgctttccccacaagttataaaatcactttatagtcatcgactggttagttcaatctacgaatgtataacattcttaaacaatatagcattcttggatgaatcatttcctagataccatagcatcgagttgatatctatcggtataagtaattcgcatgataagatttccataaactgctacaatcataaaaaaaatacatgggaaatgatatcttcacgtagatataggtgtagtttcgcagtggccgtcctggataatattatctatatgatgggtggatatgatcagtccccgtatagaagttcaaaggttatagcgtacaatacatgtacaaattcttggatatatgatataccagagctaaaatatcctcgttctaattgtgggggactggctgatgacgaatacatttattgtataggcggcatacgcgatcaggattcatcgttgacatctagtattgatagatggaagccatcaaaaccatattggcagaagtatgctaaaatgcgcgaaccaaaatgtgatatgggggttgcgatgttaaacggattaatatatgttataggtggaatcgttaaaggtgacacgtgtaccgacgcactagagagtttatcagaagatggatggatgaagcatcaacgtcttccaataaaaatgtccaatatgtcgacgattgttcatgatggcaagatttatatatctggaggttacaacaatagtagtgtagttaatgtaatatcgaatctagtccttagctataattcgatatatgatgaatggaccaaattatcatcattaaacattcctagaattaatcccgctctatggtcagcgcataataaattatatgtaggaggaggaatatctgatgatgttcgaactaatacatctgaaacatacgacaaagaaaaagattgttggacattggataatggtcacgtgttaccacgcaattatataatgtataaatgcgaaccgattaaacataaatatccattggaaaaaacacagtacacgaatgattttctaaagtatttggaaagttttataggtagttgatagaacaaaatacataattttgtaaaaataaatcactttttatactaatatgacacgattaccaatacttttgttactaatatcattagtatacgctacaccttttcctcagacatctaaaaaaataggtgatgatgcaactctatcatgtaatcgaaataatacaaatgactacgttgttatgagtgcttggtataaggagcccaattccattattcttttagctgctaaaagcgacgtcttgtattttgataattataccaaggataaaatatcttacgactctccatacgatgatctagttacaactatcacaattaaatcattgactgctagagatgccggtacttatgtatgtgcattctttatgacatcgcctacaaatgacactgataaagtagattatgaagaatactccacagagttgattgtaaatacagatagtgaatcgactatagacataatactatctggatctacacattcaccggaaactagttctgagaaacctgattatatagataattctaattgctcgtcggtattcgaaatcgcgactccggaaccaattactgataatgtagaagatcatacagacaccgtcacatacactagtgatagcattaatacagtaagtgcatcatctggagaatccacaacagacgagactccggaaccaattactgataaagaagaagatcatacagttacagacactgtctcatacactacagtaagtacatcatctggaattgtcactactaaatcaaccaccgatgatacgtacaatgataatgatacagtaccaccaactactgtaggcggtagtacaacctctattagcaattataaaaccaaggactttgtagaaatatttggtattaccgcattaattatattgtcggccgtggcaatattctgtattacgtattatatatgtaataaacgttcacgtaaatacaaaacagagaacaaagtctagatttttgacttacataaatgtctgggatagtaaaatctatcatattgagcgggccatctggtttaggaaagacagccatagccaaaagactatgggaatatatttggatttgtggtgtcccataccactagatttcctcgtcctatggaacgagaaggtgtcgattaccattacgttaacagagaggccatctggaagggaatagccgccggaaactttctagaacatactgagtttttaggaaatatttacggaacttctaaaactgctgtgaatacagcggctattaataatcgtatttgtgtgatggatctaaacatcgatggcgttagaagtcttaaaaatacgtacctaatgccttactcggtgtatataagacctacctctcttaaaatggttgagaccaagcttcgttgtagaaacactgaagcggatgatgagattcatcgtcgtgtgatgttggcaaaaactgacatggatgaggcaggtgaagccggtctattcgacactattatcattgaagatgatgtgaatttagcatatagtaagttaattcagatactacaggaccgtattagaatgtattttaacactaattagagacttaagacttaaaacttgataattaataatataactcgtttttatatgtgtctatttcaacgtctaatgtattagttaaatattaaaacttaccacgtaaaacttaaaatttaaaatgatatttcattgacagatagatcacacattatgaactttcaaggacttgtgttaactgacaattgcaaaaatcaatgggtcgttggaccattaataggaaaaggtggattcggtagtatttatactactaatgacaataattatgtagtaaaaatagagcccaaagctaacggatcattatttaccgaacaggcattttatactagagtacttaaaccatccgttatcgaagaatggaaaaaatctcacaatataaagcacgtaggtcttatcacgtgcaaggcatttggtctatacaaatccattaatgtggaatatcgattcttggtaattaatagattaggtgcagatctagatgcggtgatcagagccaataataatagactaccaaaaaggtcggtgatgttgatcggaatcgaaatcttaaataccatacaatttatgcacgagcaaggatattctcacggagatattaaagcgagtaatatagtcttagatcaaatagataagaataaattatatctagtggattacggattggtttctaaattcatgtctaatggcgaacatgttccatttataagaaatccaaataaaatggataacggtactctagaatttacacctatagattcgcataaaggatacgttgtatctagacgtggagatctagaaacacttggatattgtatgattagatggttgggaggtatcttaccatggactaagatatctgaaacaaagaattgtgcattagtaagtgccacaaaacagaaatatgttaacaatactgcgactttgttaatgaccagtttgcaatatgcacctagagaattgctgcaatatattaccatggtaaactctttgacatattttgaggaacccaattacgacaagtttcggcacatattaatgcagggtgtatattattaagtgtggtgtttggtcgataaaaattaaaaaataacttaatttattattgatctcgtgtgtacaaccgaaatcatggcgatgttttacgcacacgctctcggtgggtacgacgagaatcttcatgcctttcctggaatatcatcgactgttgccaatgatgtcaggaaatattctgttgtgtcagtttataataacaagtatgacattgtaaaagacaaatatatgtggtgttacagtcaggtgaacaagagatatattggagcactgctgcctatgtttgagtgcaatgaatatctacaaattggaaatccgatccatgatcaagaaggaaatcaaatctctatcatcacatatcgccacaaaaactactatgctctaagcggaatcgggtacgagagtctagacttgtgtttggaaggagtagggattcatcatcacgtacttgaaacaggaaacgctgtatatggaaaagttcaacatgattattctactatcaaagagaaggccaaagaaatgagtgcacttagtccaggacctatcatcgattaccacgtctggataggagattgtatctgtcaagttactgctgtggacgtacatggaaaggaaattatgaaaatgagattcaaaaagggtgcggtgcttccgatcccaaatctggtaaaagttaaacttggggagaatgatacagaaaatctttcttctactatatcggcggcaccatcgaggtaaccacctctctggaagacagcgtgaatcatgtactcatgaaacgtttggaaactatacgccatatgtggtctgttgtatatgatcattttgatattgtgaatggtaaagaatgctgttatgtgcatacgcattcatctaatcaaaatcctataccgagtactgtaaaaacaaatttgtacatgaagactatgggatcatgcattcaaatggattccatggaagctctagagtatcttagcgaactgaaggaatcaggtggatggagtcccagaccagaaatgcaggaatttgaatatccagatggagtggaagacactgaatcaattgagagattggcagaggagttcttcaatagatcagaacttcaggctggtgaatcagtcaaatttggtaattctattaattgttaaacatacatctgtttcagctaagcaactaagaacacgtatacggcagcagcttccttctatactctcatcttttaccaacacaaagggtggatatttgttcattggagttgataataatacacacaaagtatttggattcacggtgggttacgactacctcagactgatagagaatgatatagaaaagcatatcaaaagacttcgtgttgtgcatttctgtgagaagaaagaggacatcaagtacgcgtgtcgattcatcaaggtatataaacctggggatgagactacctcgacatacgtgtgcgctatcaaagtggaaagatgctgttgtgctgtgtttgcagattggccagaatcatggtatatggatactaatggtatcaagaagtattctccagatgaatgggtgtcacatataaaattttaattaatgtaactatagagaacaaataataaggttgtaatatcatatagacaataactaacaattaattagtaactgttatctcttttttaactaaccaactaactatatacctattaatacatcgtaattatagttcttaacatctattaatcattaattcgcttctttaattttttataaactaacattgttaattgaaaagggataacatgttacagaatataaattatatatggatttttttaaaaaggaaatacttgactggagtatatatttatctcttcattatatagcacgcgtgttttccaatttttccacatcccatataatacaggattataatctcgttcgaacatacgagaaagtggataaaacaatagttgattttttatctaggttgccaaatttattccatattttagaatatggggaaaatattctacatatttattctatggatgatgctaatacgaatattataattttttttctagatagagtattaaatattaataagaacgggtcatttatacacaatctcgggttatcatcatccattaatataaaagaatatgtatatcaattagttaataatgatcatccagataataggataagactaatgcttgaaaatggacgtagaacaagacattttttgtcctatatatcagatacagttaatatctatatatgtattttaataaatcatggattttatatagatgccgaagacagttacggttgtacattattacatagatgtatatatcactataagaaatcagaatcagaatcatacaatgaattaattaagatattgttaaataatggatcagatgtagataaaaaagatacgtacggaaacacaccttttatcctattatgtaaacacgatatcaacaacgtggaattgtttgagatatgtttagagaatgctaatatagactctgtagactttaatagatatacacctcttcattatgtctcatgtcgtaataaatatgattttgtaaagttattaatttctaaaggagcaaatgttaatgcgcgtaataaattcggaactactccattttattgtggaattatacacggtatctcgcttataaaactatatttggaatcagacacagagttagaaatagataatgaacatatagttcgtcatttaataatttttgatgctgttgaatctttagattatctattatccagaggagttattgatattaactatcgtactatatacaacgaaacatctatttacgacgctgtcagttataatgcgtataatacgttggtctatctattaaacaaaaatggtgattttgagacgattactactagtggatgtacatgtatttcggaagcagtcgcaaacaacaacaaaataataatggaagtactattgtctaaacgaccatctttgaaaattatgatacagtctatgatagcaattactaaacataaacagcataatgcagatttattgaaaatgtgtataaaatatactgcgtgtatgaccgattatgatactcttatagatgtacagtcgctacagcaatataaatggtatattttaagatgtttcgatgaaatagatatcatgaagagatgttatataaaaaataaaactgtattccaattagttttttgtatcaaagacattaatactttaatgagatacggtaaacatccttctttcgtgaaatgcactagtctcgacgtatacggaagtcgtgtacgtaatatcatagcatctattagatatcgtcagagattaattagtctattatccaagaagctggatcctggagataaatggtcgtgttttcctaacgaaataaaatataaaatattggaaaactttaacgataacgaactatccacatatctaaaaatcttataaacattattaaaatataaaatctaagtaggataaaatcacactacatcattgtttccttttagtgctcgacagtgtatactatttttaacgctcataaataaaaatgaaaacgatttccgttgttacgttgttatgcgtactacctgctgttgtttattcaacatgtactgtacccactatgaataacgctaaattaacgtctaccgaaacatcgtttaatgataaccagaaagttacgtttacatgtgatcagggatatcattctttggatccaaatgctgtctgtgaaacagataaatggaaatacgaaaatccatgcaaaaaaatgtgcacagtttctgattatgtctctgaactatataataaaccgctatacgaagtgaattccaccatgacactaagttgcaacggcgaaacaaaatattttcgttgcgaagaaaaaaatggaaatacttcttggaatgatactgttacgtgtcctaatgcggaatgtcaacctcttcaattagaacacggatcgtgtcaaccagttaaagaaaaatactcatttggggaatatatgactatcaactgtgatgttggatatgaggttattggtgcttcgtacataagttgtacagctaattcttggaatgttattccatcatgtcaacaaaaatgtgatatgccgtctctatctaacggattaatttccggatctacattttctatcggtggcgttatacatcttagttgtaaaagtggttttacactaacggggtctccatcatccacatgtatcgacggtaaatggaatcccatactcccaatatgtgtacgaactaacgaaaaatttgatccagtggatgatggtcccgacgatgagacagatttgagcaaactctcgaaagacgttgtacaatatgaacaagaaatagaatcgttagaagcaacttatcatataatcatagtggcgttgacaattatgggcgtcatatttttaatctccgttatagtattagtttgttcctgtgacaaaaataatgaccaatataagttccataaattgctaccgtaaatataaatccgttaaaataattaataatttaataacaaacaagtatcaaaagattaaagacttatagctagaatcaattgagatgtcttcttcagtggatgttgatatctacgatgccgttagagcatttttactcaggcactattataacaagagatttattgtgtatggaagaagtaacgccatattacataatatatacaggctatttacaagatgcgccgttataccgttcgatgatatagtacgtactatgccaaatgaatcacgtgttaaacaatgggtgatggatacacttaatggtataatgatgaatgaacgcgatgtttctgtaagcgttggcaccggaatactattcatggaaatgtttttcgattacaataaaaatagtatcaacaatcaactaatgtatgatataattaatagcgtatctataattctagctaatgagagatatagaagcgcttttaacgacgatggtatatacatccgtagaaatatgattaacaagttgtacggatacgcatctctaactactattggcacgatcgctggaggtgtttgttattatctgttgatgcatctagttagtttgtataaataattatttcaatatactagttaaaattttaagattttaaatgtataaaaaactaataacgtttttatttgtaataggtgcattagcatcctattcgaataatgagtacactccgtttaataaactgagtgtaaaactctatatagatggagtagataatatagaaaattcatatactgatgataataatgaattggtgttaaattttaaagagtacacaatttctattattacagagtcatgcgacgtcggatttgattccatagatatagatgttataaacgactataaaattattgatatgtataccattgactcgtctactattcaacgcagaggtcacacgtgtagaatatctaccaaattatcatgccattatgataagtacccttatattcacaaatatgatggtgatgagcgacaatattctattactgcagagggaaaatgctataaaggaataaaatatgaaataagtatgatcaacgatgatactctattgagaaaacatactcttaaaattggatctacttatatatttgatcgtcatggacatagtaatacatattattcaaaatatgatttttaaaaatttaaaatatattatcacttcagtgacagtagtcaaataacaaacaacaccatgagatatattataattctcgcagttttgttcattaatagtatacatgctaaaataactagttataagtttgaatccgtcaattttgattccaaaattgaatggactggggatggtctatacaatatatcccttaaaaattatggcatcaagacgtggcaaacaatgtatacaaatgtaccagaaggaacatacgacatatccgcatttccaaagaatgatttcgtatctttctgggttaaatttgaacaaggcgattataaagtggaagagtattgtacgggactatgcgtcgaagtaaaaattggaccaccgactgtaacattgactgaatacgacgaccatatcaatttgtacatcgagcatccgtatgctactagaggtagcaaaaagattcctatttacaaacgcggtgacatgtgtgatatctacttgttgtatacggctaacttcacattcggagattctaaagaaccagtaccatatgatatcgatgactacgattgcacgtctacaggttgcagcatagactttgtcacaacagaaaaagtgtgcgtgacagcacagggagccacagaagggtttctcgaaaaaattactccatggagttcgaaagtatgtctgacacctaaaaagagtgtatatacatgcgcaattagatccaaagaagatgttcccaatttcaaggacaaaatggccagagttatcaagagaaaatttaatacacagtctcaatcttatttaactaaatttctcggtagcacatcaaatgatgttaccacttttcttagcatgcttaacttgactaaatattcataactaatttttattaatgatacaaaaacgaaataaaactgcatattatacactggttaacgcccttataggctctaaccattttcaagatgaggtccctgattatagtccttctgttcccctctatcatctactccatgtctattagacgatgtgagaagactgaagaggaaacatggggattgaaaatagggttgtgtataattgccaaagatttctatcccgaaagaactgattgcagtgttcatctcccaactgcaagtgaaggattgataactgaaggcaatggattcagggatatacgaaacaccgataaattataaaaaaagcaatgtgtccgctgtttccgttaataatactattttcgtaactggcggattattcataaataactctaatagcacgatcgtggttaacaatatggaaaaacttgacatttataaagacaaacaatggtcgattatagaaatgcctatggctagggtatatcacggcattgactcgacatttggaatgttatattttgccggaggtctatccgttaccgaacaatatggtaatttagagaaaaacaacgagatatcttgttacaatcctagaacgaataagtggtttgatatttcatatactatttataagatatccatatcatcattgtgtaaactaaataacgtcttctatgtatttagtaaggacattggatatgtggaaaagtatgatggtgcatggaagttagtacatgatcgtctccccgctataaaggcattatcaacttctccttattgattgaaaatgaaaatataaatagtttttatgtatagcagtattaccctatagttttattgcttactactaacatggatacagatgttacaaatgtagaagatatcataaatgaaatagatagagagaaagaagaaatactaaaaaatgtagaaattgaaaataataaaaacattaacaagaatcatcccaatgaatatattagagaagcactcgttattaataccagtagtaatagtgattccattgataaagaagttatagaatgtatcagtcacgatgtaggaatatagatcatatctactaatttttataatcgatacaaaacataaaaaacaactcgttattacatagcaggcatggaatccttcaagtattgttttgataacgatggcaagaaatggattatcggaaatactttatattctggtaattcaatactctataaggtcagaaaaaatttcactagttcgttctacaattacgtaatgaagatagatcacaaatcacacaagccattgttgtctgaaatacgattctatatatctgtattggatcctttgactatcgacaactggacacgggaacgtggtataaagtatttggctattccagatctgtatggaattggagaaaccgatgattatatgttcttcgttataaagaattcgggaagagtattcgccccaaaggatactgaatcagtcttcgaagcatgcgtcactatgataaacacgttagagtttatacactctcgaggatttacccatggaaaaatagaaccgaggaatatactgattagaaataaacgtctttcactaattgactattctagaactaacaaactatacaagagtggaaactcacatatagattacaacgaggacatgataacttcaggaaatatcaattatatgtgtgtagacaatcatcttggagcaacagtttcaagacgaggagatttagaaatgttgggatattgcatgatagaatggttcggtggcaaacttccatggaaaaacgaaagtagtataaaagtaataaaacaaaaaaaagaatataaaaaatttatagctactttctttgaggactgttttcctgaaggaaatgaacctctggaattagttagatatatagaattagtatacacgttagattattctcaaactcctaattatgacagactacgtaaactgtttatacaagattgaaattatattcttttttttatagagtgtggtagtgttacggatatctaatattaatattagactatctctatcgcgctacacgaccaatatcgattactatggatatcttctatgaaaggagagaatgtatttatttctccagcgtcaatctcgtcagtattgacaatactgtattatggagctaatggatccactgctgaacagctatcaaaatatgtagaaacggaggagaacacggataaggttagcgctcagaatatctcattcaaatccatgaataaagtatatgggcgatattctgccgtgtttaaagattcctttttgagaaaaattggcgataagtttcaaactgttgacttcactgattgtcgcactatagatgcaatcaacaagtgtgtagatatctttactgaggggaaaatcaatccactattggatgaaccattgtctcctagcaattagtgccgtatactttaaagcaaaatggttgacgccattcgaaaaggaatttaccagtgattatcccttttacgtatctccgacggaaatggtagacgtaagtatgatgtctatgtacggcaaggcatttaatcacgcatctgtaaaagaatcattcggcaacttttcaatcatagaactgccatatgttggagatactagtatgatggtcattcttccagacaagattgatggattagaatccatagaacaaaatctaacagatacaaattttaagaaatggtgtgactttatggatgctatgtttatagatgttcacattcccaagtttaaggtaacaggctcgtataatctggtggatactctagtaaagtcaggactgacagaggtgttcggttcaactggagattatagcaatatgtgtaatttagatgtgagtgtcgacgctatgatccacaaaacgtatatagatgtcaatgaagagtatacagaagcagctgcagcaacttctgtactagtggcagactgtgcatcaacaattacaaatgagttctgtgcagatcatccgttcatctatgtgattaggcatgttgatggaaaaattcttttcgttggtagatattgctctccgacaactaattgttaaccattttttttaaaaaaaatagaaaaaacatgtggtattagtgcaggtcgttgttcttccaattgcaattggtaagatgacggccaactttagtacccacgtcttttcaccacagcactgtggatgtgacagactgaccagtattgatgacgtcaaacaatgtttgactgaatatatttattggtcgtcctatgcataccgcaacaggcaatgcgctggacaattgtattccacactcctctcttttagagatgatgcggaattagtgttcatcgacattcgcgagctggtaaaaaatatgccgtgggatgatgtcaaagattgtacagaaatcatccgttgttatataccggatgagcaaaaaaccatcagagagatttcggccatcatcggactttgtgcatatgctgctacttactggggaggtgaagaccatcccactagtaacagtctgaacgcattgtttgtgatgcttgagatgctaaattacgtggattataacatcatattccggcgtatgaattgatgagttgtacatcttgacattttctttcttctcttctccctttcttctcttctcccttcctccctcttctccctttcccagaaacaaacttttttacccactataaaataaaatgagtatactacctattatatttcttcctatatttttttattcttcattcgttcagacttttaacgcgtctgaatgtatcgacaaagggcaatattttgcatcattcatggagttagaaaacgagccagtaatcttaccatgtcctcaaataaatacgctatcatccggatataatatattagatattttatgggaaaaacgaggagcggataatgatagaattataccgatagataatggtagcaatatgctaattctgaacccgacacaatcagactctggtatttatatatgcattaccacgaacgaaacctactgtgacatgatgtcgttaaatttgacaatcgtgtctgtctcagaatcaaatatagatcttatctcgtatccacaaatagtaaatgagagatctactggcgaaatggtatgtcccaatattaatgcatttattgctagtaacgtaaacgcagatattatatggagcggacatcgacgccttagaaataagagacttaaacaacggacacctggaattattaccatagaagatgttagaaaaaatgatgctggttattatacatgtgttttagaatatatatacggtggcaaaacatataacgtaaccagaattgtaaaattagaggtacgggatagaataataccttctactatgcaattaccagatggcattgtaacttcaataggtagtaatttgactattgcatgcagagtatcgttgagacctcccacaacggacaccgacgtcttttggataagtaatggtatgtattacgaagaagatgatggggacggaaacggtagaataagtgtagcaaataaaatctatatgaccgataagagacgtgttattacatcccggttaaacattaatcctgtcaaggaagaagatgctacaacgtttacgtgtatggcgtttactattcctagcatcagcaaaacagttactgttagtataacgtgaatgtatgttgttacatttccatgtcaattgagtttataagaatttttatacattatcttccaacaaacaattgacgaacgtattgctatgattaactcccacgatactatgcatattattaatcattaacttgcagactatacctagtgctattttgacatactcgtgttcttgtgtaattgcggtatctatattattaaagtacgtaaatctagctatagttttattatttaattttagataatataccgtctccttatttttaaaaattgccacatcctttattaaatcatgaatgggaatttctatgtcatcgttagtatattgtgaacaacaagagcagatatctataggaaagggtggaatgcgatacattgatctatgtagttttaaaacacacgcgaactttgaagaatttatataaatcattccatcgatacatccttctatgttgacatgtatatatccaggaattcttttattaatgtcaggaaatgtataaactaaaacattgcccgaaagcggtgcctctatctgcgttatatccgttcttaacttacaaaatgtaaccaatacctttgcatgacttgttttgttcggcaacgttagtttaaacttgacgaatggattaattacaatagcatgatccgcgcatctattaagtttttttactttaacgcccttgtatgtttttacagagactttatctaaatttctagtgcttgtatgtgttataaatataacgggatatagaaccgaatcacctaccttagatacccaattacattttatcagatccagataataaacaaattttgtcgccctaactaattctatattgttatatattttacaattggttatgatatcatgtaataacttggagtctaacgcgcatcgtcgtacgtttatacaattgtgatttagtgtagtatatctacacatgtatttttccgcactatagtattctggactagtgataaaactatcgttatatctgtcttcaatgaactcatcgagatattgctctctgtcatattcatacacctgcataaactttctagacatcttacaatccgtgttattttaggatcatatttacatatttacgggtatatcaaagatgttagattagttaatgggaatcgtctataataatgaatattaaacaattatatgaggacttttaccacaaagcatcataaaaatgagtcgtcgtctgatttatgttttaaatatcaaccgcaaatcaactcataaaatacaagagaatgaaatatatacatattttagtcattgcaatatagaccatacttctacagaacttgattttgtagttaaaaactatgatctaaacagacgacaacctgtaactgggtatactgcactacactgctatttgtataataattactttacaaacgatgtactgaagatattattaaatcatgacgtaaatgtaacgatgaaaaccagtagcggacgtatgcctgtttatatattgcttactagatgttgtaatatttcacatgatgtagtgatagatatgatagacaaagataaaaaccacttattacatagagactattccaacctattactagagtatataaaatctcgttacatgttattgaaggaagaggatatcgatgagaacatagtatccactttattagataagggaatcgatcctaactttaaacaagacggatatacagcgttacattattattatttgtgtctcgcacacgtttataaactaggtgagtgtagaaaaccgataacgataaaaaaggccaagcgaattatttctttgtttatacaacatggagctaatctaaacgcgttagataattgtggtaatacaccattccatttgtatcttagtattgaaatgtgtaataatattcatatgactaaaatgctgttgacttttaatccgaatttcaaaatatgtaataatcatggattaacgcctatactatgttatataacttccgactacatacaacacgatattcttgttatgttaatacatcactatgaaacaaatgttggagaaatgccgatagatgagcgtcgtatgatcgtattcgagtttatcaaaacatattctacacgtccggcagattcgataacttatttgatgaataggtttaaaaatataaatatttatacccgctatgaaggaaagacattattacacgtagcatgtgaatataataatacacaagtaatagattatcttatacgtatcaacggagatataaatgcgttaaccgacaataacaaacacgctacacaactcattatagataacaaagaaaattccccatataccattaattgtttactgtatatacttagatatattgtagataagaatgtgataagatcgttggtggatcaacttccatctctacctatcttcgatataaaatcatttgagaaattcatatcctactgtatacttttagatgacacattttacgataggcacgttaagaatcgcgattctaaaacgtatcgatacgcattttcaaaatacatgtcgtttgataaatacgatggtataataactaaatgtcacgacgaaacaatgttactcaaactgtccactgttctagacactacactatatgcagttttaagatgtcataattcgagaaagttaagaagatacctcaacgagttaaaaaaatataataacgataagtcctttaaaatatattctaatattatgaatgagagataccttaatgtatattataaagatatgtacgtgtcaaaggtatatgataaactatttcctgttttcacagataaaaattgtctactaacattactaccttcagaaattatatacgaaatattatacatgctgacaattaacgatctttataatatatcgtatccacctaccaaagtatagttgtatttttctcatgcgatgtgtgtaaaaaaactgatattatataaatattttagtgccgtataataaagatgacgatgaaaatgatggtacatatatatttcgtatcattattgttattgctattccacagttacgccatagacatcgaaaatgaaatcacagaattcttcaataaaatgagagatactctaccagctaaagactctaaatggttgaatccagcatgtatgttcggaggcacaatgaatgatatagccgctctaggagagccattcagcgcaaagtgtcctcctattgaagacagtcttttatcgcacagatataaagactatgtggttaaatgggagaggctagaaaagaatagacggcgacaggtttctaataaacgtgttaaacatggtgatttatggatagccaactatacatctaaattcagtaaccgtaggtatttgtgcaccgtaactacaaagaatggtgactgtgttcagggtatagttagatctcatattaaaaaacctccttcatgcattccaaaaacatatgaactaggtactcatgataagtatggcatagacttatactgtggaattctttacgcaaaacattataataatataacttggtataaagataataaggaaattaatatcgacgacattaagtattcacaaacgggaaaggaattaattattcataatccagagttagaagatagcggaagatacgactgttacgttcattacgacgacgttagaatcaagaatgatatcgtagtatcaagatgtaaaatacttacggttataccgtcacaagaccacaggtttaaactaatactagatccgaaaatcaacgtaacgataggagaacctgccaatataacatgcactgctgtgtcaacgtcattattgatcgacgatgtactgattgaatgggaaaatccatccggatggcttataggattcgattttgatgtatactctgttttaactagtagaggcggtatcaccgaggcgaccttgtactttgaaaatgttactgaagaatatataggtaatacatataaatgtcgtggacacaactattattttgaaaaaacccttacaactacagtagtattggagtaaatatacaatgcatttttatatacattactgaattattattactgaattattattactgaattattattaattatatcgtatttgtgctatagaatggatgaagatacgcgactatctaggtatttgtatctcaccgatagagaacatataaatgtagactctattaaacagttgtgtaaaatatcagatcctaatgcatgttatagatgtggatgtacggctttacatgagtacttttataattatagatcagtcaacggaaaatacaagtatagatacaacggttactatcaatattattcatctagcgattatgaaaattataatgaatattattatgatagaactggtatgaacagtgagagtgataatatatcaatcaaaacagaatatgaattctatgatgaaacacaagatcaaagtacacaactagtaggttacgacattaaactcaaaaccaatgaggatgattttatggctatgatagatcagtgggtgtccatgattatatagatgaatcaattaataaagtagtatatggaagagagtctcacgtaagatggcgggatatatggcaagaacataatgatggcgtatacagtataggaaaggagtgcatagataatatatacgaagacaaccataccgtagacgaattctacaagatagacagcgtatcagatgtagatgacgcggaacacatatctccgataactaaaaaaccatagaatcagttgatgataatacctacatttctaatcttccgtataccatcaaatacaaaatattcgagcaacaataagtattttttatacctttaaaactgataaataaattttttctagtgatattttggcaagatgagaatcctatttctcatcgctttcatgtatgggtgtgttcactcatatgttaacgcggttgaaaccaaatgtccaaatctagacattgtaacatcttctggagaatttcattgttcaggatgtgtggaacatatgcctgagtttagctatatgtattggttggcaaaggatatgaaatcggacgaggataccaagtttatagaacatctgggtgatggcatcaaagaagatgaaaccgttcgtaccacagatagtggaatcgtcactctacgtaaagtccttcatgtgactgatactaataaatttgataattataggttcacttgtgtcctcgctacgctagatggcatttataaaaagaatgtttgctgaagtagttgtgtgctactatttttatttatgatataatctaatggaattaatttgaattgatatttatccaatactaaagattatattagaatcaaattaatcttttatacgagaaaaaataacgacatacgtcgtcaacaaattaaactttttatttattagttaactagcttatagaacttgctcattgttatgtttctaaaacgggtacggcatataggacaattatccgacgcaccggtttctcttcgtgttctatgccatatattgatgcatgttatgcaaaatatatgagtacacgaatccaataaaccaaagtatctatcgttttgagtaaacaacttcatagcaaattccacattctttttctttacttactctatacacgtcctcgtatttatttagtattttgatgatatccaactcagaaatggttgttgtattattgggtgtatttggagtataggtattattagctatgtaccaatttaccaaccctcttaatattgattgataatcacatcggttatccaattaataactaaattgtagtgtatatatagaccatatatgtttctatttttttgacagttacgtatagtttcagtaagttttgattgttgtattcctgtatctctagataagttagtcatatagtcccttccggcgatacgttttttccaagcccgaaattgattagccaaatgtgtatttatttttgtgatattgatataatatttcggataatgcatactgttagtcttatatcatttggttcatctatgtattgtaatattgttacatgatctatagatgatgtattgattttggcaggatcgaattccatatccgcgactaaacagtgaaaaaaatgtaaatactttttaaattttaaattagtaaaacttttttttattttttatgattccaaaaatactgaatacaaagtcctaaattataaatatggagatcatactaccacaacttattattatgtatacaaggccggtgtaatagatagatatatataattctattacaccggcagacaattaccgaccggtatttgtcgttaccaacataccgtataatatgtaatatacaattccataacccattgacagttgttatacatcaaaattgcaattcttttgattacgatgttataagaatgtagttaattgatgtatgatgttaatgtgtcctctttcctcttataacatcgtaatcaaaaacttttttataatatatacctaataatgtgtcttaatagttctcgtgattcgtcaaacaatcattcttataaaatataataaagcaacgtaaaaacacataaaaataagcgtaactaataagacaatggatatttacgacgataaaggtctacagactattaaactgtttaataatgaatttgattgtataaggaatgacatcagagaattatttaaacatgtaactgattccgatagtatacaacttccgatggaagacaattctgatattatagaaaatatcagaaaaatactatatagacgattaaaaaatgtagaatgtgttgacatcgataacacaataacttttatgaaatacgatccaaatgatgataataagcgtacgtgttctaattgggtacccttaactaataactatatggaatattgtctagtaatatatttggaaacaccgatatgtggaggcaaaataaaattataccaccctacaggaaatataaagtcggataaggatattatgtttgcaaagactctagactttaaatcaacgaaagtgttaactggacgtaaaacaattgccgttctagacatatccgtttcatataatagatcaatgactactattcactacaacgacgacgttgatatagatatacatactgataaaaatggaaaagagttatgttattgttatataacaatagatgatcattacttggttgatgtggaaactataggagttatagtcaatagatctggaaaatgtctgttagtaaataaccatctaggtataggtatcgttaaagataaacgtataagcgatagttttggagatgtatgtatggatacaatatttgacttttctgaagcacgagagttattttcattaactaatgatgataacaggaatatagcatgggacactgataaactagacgatgatacagatatatggactcccgtcacagaagatgattacaaatttctttctagactagtattgtatgcaaaatctcaatcggatactgtatttgactattatgttcttactggtgatacggaaccacccactgtattcattttcaaggtaactagattttactttaatatgccgaaataaaaaatttttgtataatatctagaggtagaggtattgtttagataaatacaaataacatagatacatcgcatacttagcatttttataaatatacataagacatacactttatacatttttgtaaaaatactcataaaaaaatttataaaaattatggcacaaccatatcttgtataggtagtttagttcgtcgagtgaacctataaacagataatagacaacacataataatgcctactaatacaagcataataccgggagatgggatatatgacgttgtagtgtttgggttttctgaacgttgatagtctactaatactacatgctgacatctaatgcctgtataaccatgagagcatctacaatacataccgtcaatatctctagcgtggatacagtcaccgtgtaaacaatatccatctccctctggaccgcataatctgatagctggaatatctgttgtagcgtttgtaatttctggcaatgtcgtttcgatagcgttaccactatcggcgaatgatctgattatcatagcagcgaacaacaacatcagataatttatcaacatttttgatggattctgtgtttatgctgtttctcagtgtgtgtttatgacaagattgggaattttatattattaattcagtaatataaactaataatatattgttaattgtgtaaataatataaaaataacaatacaatattgaatgtgttgctgttaaaaatgtatgtgttaatataatagaataaaataaatgagtatgatcattttagataacgattgattttatcattaccgcttcattcttatattctttgcttacggaacctatatttagaaacatctactaacaattttttatgcttgcattattaatggtatgtaatatgattgattgtgtacgcaataccaatttgttaagtatgaatacggggtacaaacataaattgaaatttaacattatttatttatgatatatatcgttatcgttaggtctataccatggatatctttaaagaactaatcttaaaacaccctgatgaaaatgttttgatttctccagtttccattttatctactttatctattctaaatcatggagcagctggttctacagctgaacaactatcaaaatatatagagaatatgaatgagaatacacccgatgacaataatgatgacatggaggtagatattccgtattgtgcgacactagctaccgcaaataaaatatacggtagcgatagtatcgagttccacgcctccttcctacaaaaaataaaagacgattttcaaactgtaaactttaataatgctaaccaaacaaaggaactaatcaacgaatgggttaagacaatgacaaatggtaaaattaattccttattgactagtccgctatccattaatactcgtatgacagttgttagcgccgtccattttaaagcaatgtggaaatatccattttctaaacatcttacatatacagacaagttttatatttctaagaatatagttaccagcgttgatatgatggtgggtaccgagaataacttgcaatatgtacatattaatgaattattcggaggattctctattatcgatattccatacgagggaaactctagtatggtaattatactaccggacgacatagaaggtatatataacatagaaaaaaatataacagatgaaaaatttaaaaaatggtgtggtatgttatctactaaaagtatagacttgtatatgccaaagtttaaagtggaaatgacagaaccgtataatctggtaccgattttagaaaatttaggacttactaatatattcggatattatgcagattttagcaagatgtgtaatgaaactatcactgtagaaaaatttctacatacgacgtttatagatgttaatgaggagtatacagaagcatcggccgttacaggagtatttacgattaacttttcgatggtatatcgtacgaaggtctacataaaccatccattcatgtacatgattaaagacaccacaggacgtatactttttatagggaaatactgctatccgcaataaatataaacaaatagacttttataaagagtcttcaacgataagtatatcgacatactacttatgctgcgaaagattctgaacgagaacgactatctcaccctcttggatcatatccgcactgctaaatactaaatctccactacactttttatcatcttatgaggaatgattgccttcgtgaaataggaataattagcaccagaatagctatggattattgtggtagagagtgcactattctatgtcgtctactggatgaagatgtgacgtacaaaaaaataaaactagaaattgaaacgtgtcacaacttatcaaaacatatagatagacgaggaaacaatgcgctacattgttacgtctccaataaatgcgatacagacattaagattgttctctcgcggagtcgagagactttgtagaaacaacgaaggattaactccgctaggagtatacagtaagcatagatacgtaaaatctcagattgtgcatctactgatatccagctattcaaattcctctaacgaactcaagtcgaatataaatgatttcgatctgtattcggataatatcgacttacgtctgctaaaatacctaattgtggataaacggatacgtccgtccaagaatacgaattatgcaatcaatggtctcggattggtggatatatacgtaacgacgcctaatccgagaccagaagtattgctatggcttcttaaatcagaatgttacagcaccggttacgtatttcgtacctgtatgtacgacagtgatatgtgtaagaactctcttcattactatatatcgtctcatagagaatctcaatctctatccaaggatgtaattaaatgtttgatcgataacaatgtttccatccatggcagagacgaaggaggatctttacccatccaatactactggtctttctcaaccatagatatagagattgttaaattattattaataaaggatgtggacacgtgtagagtatacgacgtcagccctatattagaggcgtattatctaaacaagcgatttagagtaaccccatataatgtagacatggaaatcgttaatcttcttattgagagacgtcatactcttgtcgacgtaatgcgtagtattacttcgtacgattccagagaatataaccactacatcatcgataacattctaaagagatttagacaacaggatgaatccatcgtacaagccatactgataaactacttacattacggcgatatggtcgttcgatgcatgttagataacggacaacaactatcctctacacgactactttgttaataataatctcgtcgatgtaaacgtcgtaaggtttatcgtggaaaatatggacacgcggctgtaaatcacgtatcgaacaatggccgtctatgtatgtacggtctgatattatcgagatttaataattgcgggtatcactgttatgaaaccatactgatagatgtatttgatatactaagcaagtacatggatgatatagatatgatcgataactctactatattacgcggtcgatgtcaataatatacaatttgcaaagcggttattggaatatggagcgagtatcacgctcgataatcaatacggccatccagaaaagcagttacagaagagaaaacaaaacgaaatcgttgttctacaagatgtctctccctacgacgattactacgtaaaaaagatactagcctactgcctattaagggacgagtcattcgcggaactacatagtaaattctgtttaaacgaggactataaaagtgtatttatgaaaaatatatcattcgataagatagattccatcatcgtgacataagtcgcctcaaagagattcgaatctccgacaccgacctgtatacggtatcacagctatcttaaagccatacattcagacagtcacatttcatttcccatgtacgacgatctcatagaacagtgccatctatcgatggagcgtaaaagtaaactcgtcgacaaagcactcaataaattagagtctaccatcggtcaatctagactatcgtatttgcctccggaaattatgcgcaatatcatctaaacagtatgttgtacggaaagaaccattacaaatattatccatgatagaaagaaaatatctatatgattggagaagtaggaaacaggaacaagacaacgattactacattattaaatcatgaagtccgtattatactcgtatatattgtttctctcatgtataataataaacggaagagatatagcaccgcatgcaccatccgatggaaagtgtaaagacaacgaatacaaacgccataatttgtgtccgggaacatacgcttccagattatgcgatagcaagactaacacacgatgtacgccgtgtggttcgggtaccttcacatctcgcaataatcatttacccgcttgtctaagttgtaacggaagacgcgatcgtgtaacacgactcacaatagaatctgtgaatgctctcccggatattattgtcttctcaaaggatcatccggatgcaaggcatgtgtttcccaaacaaaatgtggaataggatacggagtatccggagacgtcatctgttctccgtgtggtctcggaacatattctcacaccgtctcttccgcagataaatgcgaacccgtacccagaaatacgtttaactatatcgatgtggaaattaacctgtatccagttaacgacacgtcgtgtactcggacgaccactaccggtctcagcgaatccatctcaacgtcggaactaactattactatgaatcataaagactgtaatcccgtatttcgtgatggatacttctccgttcttaataaggtagcgacttcaggtttctttacaggagaaaggtgtgcactctgaatttcgagattaaatgcaataacaaagattcttcctccaaacagttaacgaaagcaaagaatgatactatcatgccgcattcggagacagtaactctagtgggcgacatctatatactatatagtaataccaatactcaagactacgaaactgatacaatctcttatcatgtgggtaatgttctcgatgtcgatagccatatgcccggtagttgcgatatacataaactgatcactaattccaaacccacccactttttatagtaagtttttcacccataaataataaatacaataattaatttctcgtaaaagtagaaaatatattctaatttattgcacggtaaggaagtagaatcataaagaacagtactcaatcaatagcaattatgaaacaatatatcgtcctggcatgcatgtgcctggcggcagctgctatgcctgccagtcttcagcaatcatcctcatcctcctcctcgtgtacggaagaagaaaacaaacatcatatgggaatcgatgttattatcaaagtcacaaagcaagaccaaacaccgaccaatgataagatttgccaatccgtaacggaaattacagagtccgagtcagatccagatcccgaggtggaatcagaagatgattccacatcagtcgaggatgtagatcctcctaccacttattactccatcatcggtggaggtctgagaatgaactttggattcaccaaatgtcctcagattaaatccatctcagaatccgctgatggaaacacagtgaatgctagattgtccagcgtgtccccaggacaaggtaaggactctcccgcgatcactcatgaagaagctcttgctatgatcaaagactgtgaagtgtctatcgacatcagatgtagcgaagaagagaaagacagcgacatcaagacccatccagtactcgggtctaacatctctcataagaaagtgagttacgaagatatcatcggttcaacgatcgtcgatacaaaatgcgtcaagaatctagagtttagcgttcgtatcggagacatgtgcaaggaatcatctgaacttgaggtcaaggatggattcaagtatgtcgacggatcggcatctgaaggtgcaaccgatgatacttcactcatcgattcaacaaaactcaaagcgtgtgtctgaatcgataactctattcatctgaaattggatgagtagggttaatcgaacgattcaggcacaccacgaattaaaaaagtgtaccggacactatattccggtttgcaaaacaaaaatgttcttaactacattcacaaaaagttacctctcgcgacttcttctttttctgtctcaatagtgtgatacgattatgacactattcctattcctattcctatttcctttcagagtatcacaaaaatattaaacctctttctgatggtctcataaaaaaagttttacaaaaatatttttattctctttctctctttgatggtctcataaaaaaagttttacaaaaatatttttattctctttctctctttgatggtctcataaaaaaagttttacaaaaatatttttattctctttctctctttgatggtctcataaaaaaagttttacaaaaatatttttattctctttctctctttgatggtctcataaaaaaagttttacaaaaatatttttattctctttctctctttgatggtctcataaaaaaagttttacaaaaatatttttattctctttctctctttgatggtctcataaaaaaagttttacaaaaatatttttattctctttctctctttgatggtctcataaaaaaagttttacaaaaatatttttattctctttctctctttgatggtctcataaaaaaagttttacaaaaatatttttattctctttctctctttgatggtctcataaaaaaagttttacaaaaatatttttattctctttctctctttgatggtctcataaaaaaagttttacaaaaatatttttattctctttctctctttgatggtctcataaaaaaagttttacaaaaatatttttattctctttctctctttgatggtctcataaaaaagttttacaaaaatatttttattctctttctctctttgatggtctcataaaaaagttttacaaaaatatttttattctctttctctctttgatggtctcataaaaaaagttttacaaaaatatttttattctctttctctctttgatggtctcataa

SEQ ID NO: 2 - DNA, 183369 bp, Artificial Sequence
  LIVP 1.1.1
tttttttatgagaccatcaaagagagaaagagaataaaaatatttttgtaaaactttttttatgagaccatcaaagagagaaagagaataaaaatatttttgtaaaactttttttatgagaccatcaaagagagaaagagaataaaaatatttttgtaaaactttttttatgagaccatcaaagagagaaagagaataaaaatatttttgtaaaactttttttatgagaccatcaaagagagaaagagaataaaaatatttttgtaaaactttttttatgagaccatcaaagagagaaagagaataaaaatatttttgtaaaactttttttatgagaccatcaaagagagaaagagaataaaaatatttttgtaaaactttttttatgagaccatcaaagagagaaagagaataaaaatatttttgtaaaactttttttatgagaccatcaaagagagaaagagaataaaaatatttttgtaaaactttttttatgagaccatcaaagagagaaagagaataaaaatatttttgtaaaactttttttatgagaccatcagaaagaggtttaatatttttgtgatactctgaaaggaaataggaataggaataggaatagtgtcataatcgtatcacactattgagacagaaaaagaagaagtcgcgagaggtaactttttgtgaatgtagttaagaacatttttgttttgcaaaccggaatatagtgtccggtacacttttttaattcgtggtgtgcctgaatcgttcgattaaccctactcatccaatttcagatgaatagagttatcgattcagacacacgctttgagttttgttgaatcgatgagtgaagtatcatcggttgcaccttcagatgccgatccgtcgacatacttgaatccatccttgacctcaagttcagatgattccttgcacatgtctccgatacgaacgctaaactctagattcttgacacattttgtatcgacgatcgttgaaccgatgatatcttcgtaactcactttcttatgagagatgttagacccgagtactggatgtcgctgtctttctcttcttcgctacatctgatgtcgatagacacctcacagtctttgatcatagcaagagcttcttcatgagtccttaccttgtcctggggacacgctggacaatctagcattcactgtgtttccatcagcggattctgagatggatttaatctgaggacatttggtgaatccaaagttcattctcagacctccaccgatgatggagtaataagtggtaggaggatctacatcctcgactgatgtggaatcatcttctgattccacctcgggatctggatctgactcggactctgtaatttccgttacggattggcaaatcttatcattggtcggtgtttggtcttgctttgtgactttgataataacatcgattcccatatgatgtttgttttcttcttccgtacacgaggaggaggatgaggatgattgctgaagactggcaggcatagcagctgccgccaggcacatgcatgccaggacgatatattgtttcataattgctattgattgagtactgttctttatgattctacttccttaccgtgcaataaattagaatatattttctacttttacgagaaattaattattgtatttattatttatgggtgaaaaacttactataaaaagtgggtgggtttggaattagtgatcagtttatgtatatcgcaactaccgggcatatggctatcgacatcgagaacattacccacatgataagagattgtatcagtttcgtagtcttgagtattggtattactatatagtatatagatgtcgcccactagagttactgtctccgaatgcggcatgatagtatcattctttgctttcgttaactgtttggaggaagaatctttgttattgcatttaatctcgaaattcagagtgcacacctttctcctgtaaagaaacctgaagtcgctaccttattaagaacggagaagtatccatcacgaaagacgggattacagtctttatgattcatagtaatagttagttccgacgttgagatggattcgctgagaccggtagtggtcgtccgagtacacgacgtgtcgttgacgggatacaggttaatttccacatcgatatagttaaaggtatttctgggtacgggttcgcatttatctgcggaagagacggtgtgagaatatgttccgagaccacacggagaacagatgacgtctccggatactccgtatcctattccacattttgtttgggaaacacatgccttgcatccggatgatcctttgagaagacaataatatccgggagagcattcacagattctattgtgagtcgtgttacacgatcgcgtcttccgttacaacttagacaagcgggtaaatgattattgcgagatgtgaaggtacccgaaccacacggcgtacattgtgtgttagtcttgctatcgcataatctggaagcgtatgttcccggacacaaattatggcgtttgtattcgttgtctttacactttccatcggatggtgcatgcggtgctatatctcttccgtttattattatacatgagagaaacaatatatacgagtataatacggacttcatgatttaataatgtagtaatcgtcgtcttgttcctgtttcctacttctccaatcatatagatattttctttctatcatggataatatttgtaatggttctttccgtacaacatactgtttagatgatattgcgcataatttccggaggcaaatacgatagtctagattgaccgatggtagactctaatttattgagtgctttgtcgacgagtttacttttacgctccatcgatagatggcactgttctatgagatcgtcgtacatgggaaatgaaatgtgtctgtctgaatgtatggctttaagatagctgtgataccgtatacaggtcggtgtcggagattcgaatctctttaaggcgacttatgtcacgatgatggaatctatcttatcgaatgatatatttttcataaatacacttttatagtcctcgtttaaacagaatttactatgtagttccgcgaatgactcgtcccttaataggcagtaggctagtatcttttttacgtagtaatcgtcgtagggagagacatcttgtagaacaacgatttaatcataggtagagatactttcagtctgtggtggatgatgtcattcacaacatccgccttgtatatgatgtttctgttttcaaacaccaagtcgaataccgtctttagtcggaaggttgatgtcgtatccgatgtatgaggcaacattgttgttacaattttgaaaggcggtattatagtattcgtctttctgaatgtcgaacctatctaatagataccgtagtatattgagagtgtatccttgattatgttttatgaatagataaagtagatgttgtccttcttccttttgttcgtgccaattgagtaacattatgagaatatgacctgttgcacaatcgttccatgatgggtgtacaatcaagattattacgtatcctcgtatcggctcctcgagataaaagagcatacaccacacgaggactatgtttggtatactgttgaaggtaagtgtgtaaccgcgttaatgtttgctccataatctattatcgcgtagatgaatcgcttctcggctcgcatcttagtgtgacttaacttgtaataattgctttcgtagaacgtggatatgtgtttacagtagtaatgaagagaagtgagttcatcctcgtcggcgcaattagggtcggatcctttgtacagaacgtaatagtttaagctcccattgaatttatatctaagataacacagcaatagatcggatgatttactaaagtcatcaatggtgtccgttagtatatcaaagatcttgttatcgattgatagtggtcatccttgctatcaaagttacgcatgccgtggtgtaacaatatctttaatacagatggattaaatcgtgtattcatcgtatagcaatgtaatggagagttacctcgtttattcagatcgcagtgtttaataactagcttaaacagatgagacgatgtatccacatcaaagaacgtaaaatacatatgacagacattgttgacagaaacgtgaccttcattcttaccgtcgtccataaatacgttaggtatgtaccacatactgtcgcgaacgatgcgtacaatctcgtccatctcataatgatttactttttcataattaaagatgtgaaagaaaaccgaacaatatatttttttagtaatgtttatgcgagacatataaaataaactccgtgtttatgatgccggtaaatgtttttatcatcttggacggaatcgattttgtaatatgtcatggaaacaaatgaaacaggacattatcgctccatgataaattatttaatggagtaataaagtatctccatgggtaatttcgaaatcaagttatcgtctgtattaatgttgtccactatggagtcgatcctctcattgttctttacagtttctgtaatgatggacgttagttcttttttgtaccatttgatgtcggattctttgcgtatctcaatttgtggcgtttgcttcgtttaaataatatatcaaacatggagacgcctgatatgtagacattcttcattctattaatgtctactctatagcgctttagttccttatgacgaccggcgatatcatactttactttagaaggaaaatcatcatctaggattaaggcgtatctgatacaggcgaataatggttcaggatatagatagcgtatatctctattaaatgcgtcaatcatagtctctagagtgggatggtaactcagtaataaatcaactagcttcgttttgttttctctttggtaactgcttttctggatggccgtattgattatcgagcgtgacactcgctccatattccaataaccgctttgcaaattgtatattattgacatcgaccgcgtaatatagtagagttatcgatcatatctatatcatccatgtacttgcttagtatatcaaatacatctatcagtatggtttcataacagtgatacccgcaattattaaatctcgataatatcagaccgtacatacatagacggccattgttcgatacgtgatttacagccgcgtgtccatattttccacgataaaccttacgacgtttacatcgacgagattattattaacaaagtagtcgtgcagaggatagttgttgtccgttatctaacatgcatcgaacgaccatatcgccgtaatgtaagtagtttatcaacatggcttgtacatcctgttgtctaaatctctttagaatgttatcgatgatgtagtggttatattctctggaatcgtacgaagtaatactacgcattacgtcgacaagagtatgacgtctctcaataagaagattaacgatttccatgtctacattatatggggttactctaaatcgcttgtttagataatatagggctgacgtcgtatactctacacgtgtccacatcctttattaataataatttaacaatctctatatctatggttgagaaagaccagtagtattggatgggtaaagatcctccttcgtctctgccatggatggaaacattgttatcgatcaaacatttaattacatccttggatagagattgagattctctatgagacgatatatagtaatgaagagagttcttacacatatcactgtcgtacatacaggtacgaaatacgtaaccggtgctgtaacattctgatttaagaagccatagcaatacttctggtctcggattaggcgtcgttacgtatatatccaccaatccgagaccattgattgcataattcgtattcttggacggacgtatccgtttatccacaattaggtattttagcagacgtaagtcgatattatccgaatacagatcgaaatcatttatattcgacttgagttcgttagaggaatttgaatagctggatatcagtagatgcacaatctgagattttacgtatctatgcttactgtatactcctagcggagttaatccttcgttgtttctacaaagtctctcgactccgcgagagaacaatcttaatgtctgtatcgcatttattggagacgtaacaatgtagcgcattgtttcctcgtctatctatatgttttgataagttgtgacacgtttcaatttctagttttatttttttgtacgtcacatcttcatccagtagacgacatagaatagtgcactctctaccacaataatccatagctattctggtgctaattattcctatttcacgaaggcaatcattcctcataagatgataaaaagtgtagtggagatttagtatttagcagtgcggatatgatccaagagggtgagatagtcgttctcgttcagaatctttcgcagcataagtagtatgtcgatatacttatcgttgaagactctttataaaagtctatttgtttatatttattgcggatagcagtatttccctataaaaagtatacgtcctgtggtgtctttaatcatgtacatgaatggatggtttatgtagaccttcgtacgatataccatcgaaaagttaatcgtaaatactcctgtaacggccgatgcttctgtatactcctcattaacatctataaacgtcgtatgtagaaatttttctacagtgatagtttcattacacatcttgctaaaatctgcataatatccgaatatattagtaagtcctaaattttctaaaatcggtaccagattatacggttctgtcatttccactttaaactttggcatatacaagtctatacttttagtagataacataccacaccattttttaaatttttcatctgttatatttttttctatgttatatataccttctatgtcgtccggtagtataattaccatactagagtttccctcgtatggaatatcgataatagagaatcctccgaataattcattaatatgtacatattgcaagttattctcggtacccaccatcatatcaacgctggtaactatattcttagaaatataaaacttgtctgtatatgtaagatgtttagaaaatggatatttccacattgctttaaaatggacggcgctaacaactgtcatacgagtattaatggatagcggactagtcaataaggaattaattttaccatttgtcattgtcttaacccattcgttgattagttcctttgtttggttagcattattaaagtttacagtttgaaaatcgtcttttattttttgtaggaaggaggcgtggaactcgatactatcgctaccgtatattttatttgcggtagctagtgtcgcacaatacggaatatctacctccatgtcatcattattgtcatcgggtgtattctcattcatattctctatatattttgatagttgttcagctgtagaaccagctgctccatgatttagaatagataaagtagataaaatagaaactggagaaatcaaaacattttcatccgtgtgttttaagattagttctttaaagatatccatggtatagaccaaacaataacgataacgatatatatcataaataaataatgttaaatttcagtttatgtttgtaccccgtattcatacttaacaaattggtattgcgtacacaatcaatcatattacataccattaataatgcaagcataaaaaattgttagtagatgtttctaaatataggttccgtaagcaaagaatataagaatgaagcggtaatgataaaatcaatcgttatctaaaatgatcatactcatttattttattctattatattaacacatacatttttaacagcaacacattcaatattgtattgttatttttatattatttacacaattaacaatatattattagtttatattactgaattaataatataaaattcccaatcttgtcataaacacacactgagaaacagcataaacacagaatccatcaaaaatgttgataaattatctgatgttgttgttcgctgctatgataatcagatcattcgccgatagtggtaacgctatcgaaacgacattgccagaaattacaaacgctacaacagatattccagctatcagattatgcggtccagagggagatggatattgtttacacggtgactgtatccacgctagagatattgacggtatgtattgtagatgctctcatggttatacaggcattagatgtcagcatgtagtattagtagactatcaacgttcagaaaacccaaacactacaacgtcatatatcccatctcccggtattatgcttgtattagtaggcattattatgtgttgtctattatctgtttataggttcactcgacgaactaaactacctatacaagatatggttgtgccataatttttataaatttttttatgagtatttttacaaaaatgtataaagtgtatgtcttatgtatatttataaaaatgctaagtatgcgatgtatctatgttatttgtatttatctaaacaatacctctacctctagatattatacaaaaattttttatttcggcatattaaagtaaaatctagttaccttgaaaatgaatacagtgggtggttccgtatcaccagtaagaacataatagtcaaatacagtatccgattgagattttgcatacaatactagtctagaaagaaatttgtaatcatcttctgtgacgggagtccatatatctgtatcatcgtctagtttatcagtgtcccatgctatattcctgttatcatcattagttaatgaaaataactctcgtgcttcagaaaagtcaaatattgtatccatacatacatctccaaaactatcgcttatacgtttatctttaacgatacctatacctagatggttatttactaacagacattttccagatctattgactataactcctatagtttccacatcaaccaagtaatgatcatctattgttatataacaataacataactcttttccatttttatcagtatgtatatctatatcaacgtcgtcgttgtagtgaatagtagtcattgatctattatatgaaacggatatgtctagaacggcaattgttttacgtccagttaacactttcgttgatttaaagtctagagtctttgcaaacataatatccttatccgactttatatttcctgtagggtggtataattttattttgcctccacatatcggtgtttccaaatatattactagacaatattccatatagttattagttaagggtacccaattagaacacgtacgcttattatcatcatttggatcgtatttcataaaagttattgtgttatcgatgtcaacacattctacattttttaatcgtctatatagtatttttctgatattttctataatatcagaattgtcttccatcggaagttgtatactatcggaatcagttacatgtttaaataattctctgatgtcattccttatacaatcaaattcattattaaacagtttaatagtctgtagacctttatcgtcgtaaatatccattgtcttattagttacgcttatttttatgtgtttttacgttgctttattatattttataagaatgattgtttgacgaatcacgagaactattaagacacattattaggtatatattataaaaaagtttttgattacgatgttataagaggaaagaggacacattaacatcatacatcaattaactacattcttataacatcgtaatcaaaagaattgcaattttgatgtataacaactgtcaatgggttatggaattgtatattacatattatacggtatgttggtaacgacaaataccggtcggtaattgtctgccggtgtaatagaattatatatatctatctattacaccggccttgtatacataataataagttgtggtagtatgatctccatatttataatttaggactttgtattcagtatttttggaatcataaaaaataaaaaaaagttttactaatttaaaatttaaaaagtatttacatttttttcactgtttagtcgcggatatggaattcgatcctgccaaaatcaatacatcatctatagatcatgtaacaatattacaatacatagatgaaccaaatgatataagactaacagtatgcattatccgaaatattatatcaatatcacaaaaataaatacacatttggctaatcaatttcgggcttggaaaaaacgtatcgccggaagggactatatgactaacttatctagagatacaggaatacaacaatcaaaacttactgaaactatacgtaactgtcaaaaaaatagaaacatatatggtctatatatacactacaatttagttattaattggataaccgatgtgattatcaatcaatattaagagggttggtaaattggtacatagctaataatacctatactccaaatacacccaataatacaacaaccatttctgagttggatatcatcaaaatactggataaatacgaggacgtgtatagagtaagtaaagaaaaagaatgtggaatttgctatgaagttgtttactcaaaacgatagatactttggtttattggattcgtgtactcatatattttgcataacatgcatcaatatatggcatagaacacgaagagaaaccggtgcgtcggataattgtcctatatgccgtacccgttttagaaacataacaatgagcaagttctataagctagttaactaataaataaaaagtttaatttgttgacgacgtatgtcgttattttttctcgtataaaagattaatttgattctaatataatctttagtattggataaatatcaattcaaattaattccattagattatatcataaataaaaatagtagcacgcactacttcagccaaatattcttttttgaaacgccatctatcgtagtgaggacacaagtgaacctataattatcaaatttattagtatcggttacatgaaggactttacgtagagtgacgattccactatctgtggtacgaacggtttcatcttctttgatgccatcacccagatgttctataaacttggtatcctcgtccgatctcatatcctttgccaaccaatacatgtagctaaaattaggcataaatttcacacatcctgaacaatgaaattctccagaagatgttacaatgtctagatttggacatttggtttcaaccgcgttaacatatgagtgaacacacccatacatgaaagcgatgagaaataggattctcatcttgccaaaatatcactagaaaaaatttatttatcagttttaaaggtataaaaaatacttattgttgctcgaatattttgtatttgatggtatacggaagattagaaatgtaggtattatcatcaactgattctatggttttatgtattctatcatgtttcactattgcgttggaaataatatcatatgcttccacatatattttattttgttttaactcataatactcacgtaattctggattattggcatatctatgaataattttagctccatgatcagtaaatattaatgagaacatagtattaccacctaccattatttttttcatctcattcaattcttaattgcaaagatctatataatcattatagcgttgacttatggactctggaatcttagacgatgtacagtcatctataatcatggcatatttaatacattgttttatagcatagtcgttatctacgatgttagatatttctctcaatgaatcaatcacacaatctaatgtaggtttatgacataatagcattttcagcagttcaatgtttttagattcgttgatggcaatggctatacatgtatatccgttatttgatctaatgttgacatctgaaccggattctagcagtaaagatactagagattgtttattatatctaacagccttgtgaagaagtgtttctcctcgtttgtcaatcatgttaatgtctttaagataaggtaggcaaatgtttatagtactaagaattgggcaagcataagacatgtcacaaagacccttttttgtatgtataagtgtaaaaattataacatccatagttggatttacataggtgtccaatcgggatctctccatcatcgagataattgatggcatctcccttccttttttagtagatatttcatcgtgtaagaatcaatattaatatttctaaagtatccgtgtatagcctctttatttaccacagctccatattccactagagggatatcgccgaatgtcatatactcaattagtatatgttggaggacatccgagttcattgttttcaatatcaaagagatggtttccttatcatttctccatagtggtacaatactacacattattccgtgcggctttccattttccaaaaacaatttgaccaaatctaaatctacatctttattgtatctataatcactatttagataatcagccataattcctcgagtgcaacatgttagatcgtctatatatgaataagcagtgttatctattcctttcattaacaatttaacgatgtctatatctatatgagatgacttaatataatattgaagagctgtacaatagtttttatctataaaagacggcttgattccgtgattaattagacatttaacaacttccggacgcacatatgctctcgtatccgactttgaatacagatgagagatgatatacagatgcaatacggtaccgcaatttcgtagttgataatcatcatacgcgtatcagtactcgtcctcataaagaacactgcagccattttctatgaacaaatcaataattttagaaacaggatcattgtcattacataattttctataactgaacgatggttttcacatttaacactcaagtcaaatccatgttctaccaacacctttatcaagtcaacgtctacatttttggatttcatatagctgaatatattaaagttatttatgttgctaaatccagtggcttctagtagagccatcgctatatccttattaactttaacatgtctactatttgtgtattcttctaatggggtaagctgtctccaatttttgcgtaatggattagtgccactgtctagtagtagtttgacgacctcgacattattacaatgctcattaaaaaggtatgcgtgtaaagcattattcttgaattggttcctggtatcattaggatctctgtctttcaacatctgtttaagttcatcaagagccacctcctcattttccaaatagtcaaacattttgactgaatgagctactgtgaactctatacacccacacaactaatgtcattaaatatcatgtcaaaaacttgtacaattattaataaaaataatttagtgtttaaattttaccagttccagattttacacctccgttaatacctccattaaccccactggacgatcctcctccccacattccaccgccaccagatgtataagttttagatcctttattactaccatcatgtccatggataaagacactccacatgccgccactaccccctttagaagacatattaataagacttaaggacaagtttaacaataaaattaatcacgagtaccctactaccaacctacactattatatgattatagtttctatttttacagtaccttgactaaagtttctagtcacaagagcaatactaccaacctacactattatatgattatagtttctatttttataggaacgcgtacgagaaaatcaaatgtctaatttctaacggtagtgttgataaacgattgttatccgcggatacctcctctatcatgtcgtctattttcttactttgttctattaacttattagcattatatattatttgattataaaacttatattgcttattagcccaatctgtaaatatcggattattaacatatcgtttctttgtaggtttatttaacatgtacatcactgtaagcatgtccttaccatttattttaatttgacgcatatccgcaatttctttttcgcagtcggttataaattctatatatgatggatacatgctacatgtgtacttataatcgactaatatgaagtacttgatacatattttcagtaacgatttattattaccacctatgaataagtacctgtgatcgtctaggtaatcaactgttttcttaatacattcgatggttggtaatttactcagaataatttccaatatcttaatatataattctgctatttctgggatatatttatctgccagtataacacaaatagtaatacatgtaaacccatattttgttattatattaatgtctgcgccattatctattaaccattctactaggctgacactatgcgactcaatacaatgataaagtatactacatccatgtttatctattttgtttatatcatcaatatacggcttacaaagttttagtatcgataacacatccaactcacgcatagagaaggtagggaataatggcataatatttattaggttatcatcattgtcattatctacaactaagtttccattttttaaaatatactcgacaactttaggatctctattgccaaatttttgaaaatatttatttatatgcttaaatctatataatgtagctccttcatcaatcatacatttaataacattgatgtatactgtatgataagatacatattctaacaatagatcttgtatagaatctgtatatcttttaagaattgtggatattaggatattattacataaactattacacaattctaaaatataaaacgtatcacggtcgaataatagttgatcaactatataattatcgattttgtgatttttcttcctaaactgtttacgtaaatagttagatagaatattcattagttcatgaccactatagttactatcgaataacgcgtcaaatatttcccgtttaatatcgcatttgtcaagataataatagagtgtggtatgttcacgataagtataataacgcatctctttttcgtgtgaaattaaatagtttattacgtccaaagatgtagcataaccatcttgtgacctagtaataatataataatagagaactgttttacccattctatcatcataatcagtggtgtagtcgtaatcgtaatcgtctaattcatcatcccaattataatattcaccagcacgtctaatctgttctattttgatcttgtatccatactgtatgttgctacatgtaggtattcctttatccaataatagtttaaacacatctacattgggatttgatgttgtagcgtatttttctacaatattaataccatttttgatactatttatttctatacctttcgaaattagtaatttcaataagtctatattgatgttatcagaacatagatattcgaatatatcaaaatcattgatatttttatagtcgactgacgacaataacaaaatcacaacatcgtttttgatattattatttttcttggtaacgtatgcctttaatggagtttcaccatcatactcatataatggatttgcaccactttctatcaatgattgtgcactgctggcatcgatgttaaatgttttacaactatcatagagtatcttatcgttaaccatgattggttgttgatgctatcgcattttttggtttctttcatttcagttatgtatggatttagcacgtttgggaagcatgagctcatatgatttcagtactgtagtgtcagtactattagtttcaataagatcaatctctagatctatagaatcaaaacacgataggtcagaagataatgaatatctgtacgcttcttgttgtactgtaacttctggttttgttagatggttgcatcgtgctttaacgtcaatggtacaaattttatcctcgctttgtgtatcatattcgtccctactataaaattctatattcagattatcatgcgatgtgtatacgctaacggtatcaataaacggagcacaccatttagtcataaccgtaatccaaaaatttttaaagtatatcttaacgaaagaagttgtatcattgtctacggtgtatggtactagatcctcataagtgtatatatctagagtaatgtttaatttattaaatggttgataatatggatcgtcgtggcaatttcctaagatggaaatgagatatagacacgcaataaatctaatcgaagacatggttactccttaaaaaaatacgaataatcaccttggctatttagtaagtgtcatttaacactatactcatattaatccatggactcataatctctatacgggattaacggatgttctatatacggggatgagtagttctcttctttaactttatactttttactaatcatatttagactgatgtatgggtaatagtgtttgaagagctcgttctcatcatcagaataaatcaatatctctgtttttttgttatacagatgtattacagcctcatatattacgtaatagaacgtgtcatctaccttattaactttcaccgcatagttgtttgcaaatacggttaatcctttgacctcgttgatttccgaccaatctgggcgtataatgaatctaaactttaatttcttgtaatcattcgaaataatttttagtttgcatccgtagttatcccctttatgtaactgtaaatttctcaacgcgatatctccattaataatgatgtcgaattcgtgctgtatacccatactgaatggatgaacgaataccgacggcgttaatagtaatttactttttcatctttacatattgggtactagttttactatcataagtttataaattccacaagctactatggaataagccaaccatcttagtataccacacatgtcttaaagtttattaattaattacatgttgttttatatatatcgctacgaatttaaacagagaaatcagtttaggaaaaaaaaaattatctatctacatcatcacgtctctgtattctacgatagagtgctactttaagatgagacatatccgtgtcatcaaaaatatactccattaaaatgattattccggcagcgaacttgatattggatatatcacaacctttgttaatatctacgacaatagacagcagtcccatggttccataaacagtgagtttatctttctttgaagagatattttgtagagatcttataaaactgtcgaatgacatcgcatttatatctttagctaaatcgtatatgttaccatcgtaatatctaaccgcgtctatcttaaacgtttccatcgctttaaagacgtttccgatagatggtctcatttcatcagtcatactgagccaacaaatataatcgtgtataacatctttgatagaatcagactctaaagaaaacgaatcggctttattatacgcattcatgataaacttaatgaaaaatgtttttcgttgtttaagttggatgaatagtatgtcttaataattgttattatttcattaattaatatttagtaacgagtacactctataaaaacgagaatgacataactaatcataactagttatcaaagtgtctaggacgcgtaattttcatatggtatagatcctgtaagcattgtctgtattctggagctattttctctatcgcattagtgagttcagaatatgttataaatttaaatcgaataacgaacataactttagtaaagtcgtctatattaactcttttattttctagccatcgtaataccatgtttaagatagtatattctctagttactacgatctcatcgttgtctagaatatcacatactgaatctacatccaattttagaaattggtctgtgttacatatctcttctatattattgttgatgtattgtcgtagaaaactattacgtagaccattttctttataaaacgaatatatagtactccaattatctttaccgatatatttgcacacataatccattctctcaatcactacatctttaagattttcgttgttaagatatttggctaaactatataattctattagatcatcaacagaatcagtatatatttttctagatccaaagacgaactctttggcgtcctctataatattcccagaaaagatattttcgtgttttagtttatcgagatctgatctgttcatatacgccatgattgtacggtacgttatgataaccgcataaaataaaaatccattttcatttttaaccaatactattcataattgagattgatgtaatactttgttactttgaacgtaaagacagtacacggatccgtatctccaacaagcacgtagtaatcaaatttggtgttgttaaacttcgcaatattcatcaatttagatagaaacttatactcatcatctgttttaggaatccatgtattattaccactttccaacttatcattatcccaggctatgtttcgtccatcatcgttgcgcagagtgaataattcttttgtattcggtagttcaaatatatgatccatgcatagatcggcaaagctattgtagatgtgatttttcctaaatctaatataaaactcgtttactagcaaacactttcctgatttatcgaccaagacacatatggtttctaaatctatcaagtggtggggatccatagttatgacgcagtaacatatattattacattcttgactgtcgctaatatctaaatatttattgttatcgtattggattctgcatatagatggcttgtatgtcaaagatatagaacacataaccaatttatagtcgcgctttacattctcgaatctaaagttaagagatttagaaaacattatatcctcggatgatgttatcactgtttctggagtaggatatattaaagtctttacagatttcgtccgattcaaataaatcactaaataatatcccacattatcatctgttagagtagtatcattaaatctattatattttatgaaagatatatcactgctcacctctatatttcgtacatttttaaactgtttgtataatatctctctgatacaatcagatatatctattgtgtcggtagacgataccgttacatttgaattaatggtgttccattttacaacttttaacaagttgaccaattcatttctaatagtatcaaactctccatgattaaatattttaatagtatccattttatatcactacggacacaaagtagctgacataaaccattgtataatttttatgttttatgtttattagcgtacacattttggaagttccggcttccatgtatttcctggagagcaagtagatgatgaggaaccagatagtttatatccgtacttgcacttaaagtctacattgtcgttgtatgagtatgatcttttaaacccgctagacaagtatccgtttgatattgtaggatgtggacatttaacaatctgacacgtgggtggatcggaccattctcctcctgaacacaggacactagagttaccaatcaacgaatatccactattgcaactataagttacaacgctcccatcggtataaaaatcctcgtatccgttatgtcttccgttggatatagatggaggggattggcatttaacagattcacaaataggtgcctcgggattccataccatagatccagtagatcctaattcacaatacgatttagattcaccgatcaactgatatccgctattacaagagtacgttatactagagccaaagtctactccaccaatatcaagttggccattatcgatatctcgaggcgatgggcatctccgtttaatacattgattaaagagtgtccatccagtacctgtacatttagcatatataggtcccattttttgctttctgtatccaggtagacatagatattctatagtgtctcctatgttgtaattagcattagcatcagtctccacactattcttaaatttcatattaatgggtcgtgacggaatagtacagcatgatagaacgcatcctattcccaacaatgtcaggaacgtcacgctctccaccttcatatttatttatccgtaaaaatgttatcctggacatcgtacaaataataaaaagcccatatatgttcgctattgtagaaattgtttttcacagttgctcaaaaacgatggcagtgacttatgagttacgttacactttggagtctcatctttagtaaacatatcataatattcgatattacgagttgacatatcgaacaaattccaagtatttgattttggataatattcgtattttgcatctgctataattaagatataatcaccgcaagaacacacgaacatctttcctacatggttaaagtacatgtacaattctatccatttgtcttccttaactatatatttgtatagataattacgagtctcgtgagtaattccagtaattacatagatgtcgccgtcgtactctacagcataaactatactatgatgtctaggcatgggagacttttttatccaacgatttttagtgaaacattccacatcgtttaatactacatatttctcatacgtggtataaactccacccattacatatatatcatcgtttacgaataccgacgcgcctgaatatctaggagtaattaagtttggaagtcttatccatttcgaagtgccgtgtttcaaatattctgccacacccgttgaaatagaaaattctaatcctcctattacatataactttccatcgttaacacaagtactaacttctgattttaacgacgacatattagtaaccgttttccattttttcgttttaagatctacccgcgatacggaataaacatgtctattgttaatcatgccgccaataatgtatagacaattatgtaaaacatttgcattatagaattgtctatctgtattaccgactatcgtccaatattctgttctaggagagtaatgggttattgtggatatataatcagagtttttaatgactactatattatgttttataccatttcgtgtcactggctttgtagatttggatatagttaatcccaacaatgatatagcattgcgcatagtattagtcataaacttgggatgtaaaatgttgatgatatctacatcgtttggatttttatgtatccactttaataatatcatagctgtaacatcctcatgatttacgttaacgtcttcgtgggataagatagttgtcagttcatcctttgataattttccaaattctggatcggatgtcaccgcagtaatattgttgattatttctgacatcgacgcattatatagttttttaattccatatcttttagaaaagttaaacatccttatacaatttgtgaaattaatattatgaatcatagtttttacacatagatctactacaggcggaacatcaattattatggcagcaactagtatcatttctacattgtttatggtgatgtttatcttcttccagcgcatatagtctaatagcgattcaaacgcgtgatagtttataccattcaatataatcgcttcatcctttagatggtgatcctgaatgcgtttaaaaaaattatacggagacgccgtaataatttccttattcacttgtataatttccccattgatagaaaatattacgctttccattcttaaagtactataagtaattatagtataatgtaaacgtttatatattcaatatttttataaaaatcattttgacattaattcctttttaaatttccgtctatcatctatagaaacgtattctatgaatttataaaatgcttttacgtgtcctatcgtaggcgatagaaccgctaaaaagcctatcgaatttctacaaaagaatctgttatatggtatagggagagtataaaacattaaatgtccgtacttattaaagtattcagtagccaatcctaactctttcgaatacttattaatggctcttgttctgtacgaatctatttttttgaacaacggacctagtggtatatcttgttctatgtatctaaaataatgtctgactagatccgttagtttaatatccgcagtcatcttgtctagaatggcaaatctaactgcgggtttaggctttagtttagtttctatatctacatctatgtctttatctaacaccaaaaatataatagctaatattttattacaatcatccggatattcttctacgatctcactaactaatgtttctttggttatactagtatagtcactatcggacaaataaagaaaatcagatgatcgatgaataatacatttaaattcatcatctgtaagatttttgagatgtctcattagaatattattagggttagtactcattatcattcggcagctattacttattttattatttttcaccatatagatcaatcattagatcatcaaaatatgtttcaatcatcctaaagagtatggtgaatgactcttcccatctaatttctgaacgttcaccaatgtctctagccactttggcactaatagcgatcattcgcttagcgtcttctatattattaactggttgatttaatctatctagcaatggaccgtcggacagcgtcattctcatgttcttaatcaatgtacatacatcgccgtcatctaccaattcatccaacaacataagctttttaaaatcatcattataataggtttgatcgttgtcatttctccaaagaatatatctaataagtagagtcctcatgcttagttaacaactattttttatgttaaatcaattagtacaccgctatgtttaatacttattcatattttagtttttaggattgagaatcaatacaaaaaattaatgcatcattaattttagaaatacttagtttccacgtagtcaatgaaacatttgaactcatcgtacaggacgttctcgtacaggacgtaactataaaccggtttatatttgttcaagatagatacaaatccgataactttttttacgaattctacgggatccactttaaaagtgtcataccgggttctttttatttttttaaacagatcaatggtgtgatgttgattaggtcttttacgaatttgatatagaatagcgtttacatatcctccataatggtcaatcgccatttgttcgtatgtcataaattctttaattatatgacactgtgtattatttagttcatccttgttcattgttaggaatctatccaaaatggcaattatactagaactataggtgcgttgtatacacatattgatgtgtctgtttatacaatcaatgctactaccttcgggtaaaattgtagcatcatataccatttctagtactttaggttcattattatccattgcagaggacgtcatgatcgaatcataaaaaaatatattatttttatgttattttgttaaaaataatcatcgaatacttcgtaagatactccttcatgaacataatcagttacaaaacgtttatatgaagtaaagtatctacgatttttacaaaagtccggatgcataagtacaaagtacgcgataaacggaataataatagatttatctagtctatctttttctatagctttcatagttagatacatggtctcagaagtaggattatgtaacatcagcttcgataaaatgactgggttatttagtcttacacattcgctcatacatgtatgaccgttaactacagagtctacactaaaatgattgaacaatagatagtctaccattgtttcgtattcagatagtacagcgtagtacatggcatcttcacaaattatatcattgtctaatagatatttgacgcatcttatggatcccacttcaacagccatcttaaaatcggtagaatcatattgctttcctttatcattaataatttctagaacatcatctctatcataaaagatacaaatattaactgtttgatccgtaataacattgctagtcgatagcaatttgttaataagatgcgctgggctcaatgtcttaataagaagtgtaagaggactatctccgaatttgttttgtttattaacatccgttgatggaagtaaaagatctataatgtctacattcttgactgttttagagcatacaatatggagaggtgtatttccatcatgatctggttttgagggactaattcctagtttcatcatccatgagattgtagaagcttttggattgtctgacataagatgtctatgaatatgatttttgccaaatttatccactatcctggcttcgaatccgatggacattatttttttaaacactctttctgaaggatctgtacacgccaacaacggaccacatccttcttcatcaaccgagttgttaatcttggctccatactgtaccaataaatttattctctctatgacttcatcatctgttcccgagagataatatagaggcgttttatgctgtttatcacacgcgtttggatctgcgccgtgcgtcagcagcatcgcgactattctattattattaattttagaagctatatgcaatggataatttccatcatcatccgtctcatttggagagtatcctctatgaagaagttcttcgacaaatcgttcatctagtcctttaattccacaatacgcatgtagaatgtgataattatttccagaaggttcgatagcttgtagcatattcctaaatacatctaaatttttactattatatttggcataaagagatagataatactcggccgacataatgttgtccattgtagtataaaaattaatatttctatttctgtatatttgcaacaatttactctctataacaaatatcataacttagttcttttatgtcaagaaggcactggtttagttcatctataaatgtcacgccataactaccacgcatgccatactcagaattatgataaagatatttatccttggggtgtaggtaatggggattaatctttgttggatcagtctctaagttaacacatgtcacacatgatccatttatagttatatcacacgatgatgatttatgaattgattccggaagatcgctatcgtattttgtggttccacaattcatttccatacatgttattgtcacactaatattatgatgaactttatctagccgctgagtggtaaacaacagaacagatagtttattatctttaccaacaccctcagccgctgccacaaatctctgatccgtatccatgatggtcatgtttatttctagtccgtatccagtcaacactatgttagcatttctgtcgatatagctttcactcatatgacactcaccaataatagtagaattaatgtcgtaatttacaccaatagtgagttcggcggcaaagtaccaataccggtaatcttgtcgaggaggacatatagtattcttgtattctaccgaatacccgagagatgcgatacaaaagagcaagactaatttgtaaaccatcttactcaaaatatgtaacaatagtacgatgcaatgagtaagacaataggaaatctatcttatatacacataattattctatcaattttaccaattagttagtgtaatgttaacaaaaatgtgggagaatctaattagtttttctttacacaattgacgtacatgagtctgagttccttgtttttgctaattatttcatccaatttattattcttgacgatatcgagatcttttgtataggagtcaaacttgtattcaacatgcttttctataatcattttagctatttcggcatcatccaatagtacattttccagattagcagaatagatattaatgtcgtatttgaacagagcctgtaacatctcaatgtctttattatctatagccaatttaatgtccggaatgaagagaagggaattattggtgtttgtcgacgtcatatagtcgagcaagagaatcatcatatccacgtgtccattttttatagtgatgtgaatacaactaaggagaatagccagatcaaaagtagatggtatctctgaaagaaagtaggaaacaatacttacatcattaagcatgacggcatgataaaatgaagttttccatccagttttcccatagaacatcagtctccaatttttcttaacaaacagttttaccgtttgcatgttaccactatcaaccgcataatacaatgcggtgtttcccttgtcatcaaattgtgaatcatccagtccactgaatagcaaaatctttactattttggtatcttccaatgtggctgcctgatgtaatggaaattcattctctagaagatttttcaatgctccagcgttcaacaacgtacatactagacgcacgttattatcagctattgcataatacaaggcactatgtccatggacatccgccttaaatgtatctttactagagagaaagcttttcagctgcttagacttccaagtattaattcgtgacagatccatgtctgaaacgagacgctaattagtgtatattttttcattttttataattttgtcatattgcaccagaattaataatatctttaatagatctgattagtagatacatggctatcgcaaaacaacatatacacatttaataaaaataatatttattaagaaaattcagatttcacgtacccatcaatataaataaaataatgattccttacaccgtacccatattaaggagattccaccttacccataaacaatataaatccagtaatatcatgtctgatgatgaacacaaatggtgtattaaattccagtttttcaggagatgatctcgccgtagctaccataatagtagatgcctctgctacagttccttgttcgtcgacatctatctttgcattctgaaacattttataaatatataatgggtccctagtcatatgtttaaacgacgcattatctggattaaacatactaggagccatcatttcggctatcgacttaatatccctcttattttcgatagaaaatttagggagtttaagattgtacactttattccctaattgagacgaccaatagtctaattttgcagccgtgatagaatctgtgaaatgggtcatattatcacctattgccaggtacatactaatattagcatccttatacggaaggcgtaccatgtcatattctttgtcatcgattgtgattgtatttccttgcaatttagtaactacgttcatcatgggaaccgttttcgtaccgtacttattagtaaaactagcattgcgtgttttagtgatatcaaacggatattgccatatacctttaaaatatatagtattaatgattgcccatagagtattattgtcgagcatattagaatctactacattagacataccggatctacgttctactatagaattaattttattaaccgcatctcgtctaaagtttaatctatataggccgaatctatgatattgttgataatacgacggtttaatgcacacagtattatctacgaaactttgataagttagatcagtgtacgtatatttagatgttttcagcttagctaatcctgatattaattctgtaaatgctggacccagatctctttttctcaaatccatagtcttcaataattctattctagtattacctgatgcaggcaatagcgacataaacatagaaaacgaataaccaaacggtgagaagacaatattatcatcttgaatatttttatacgctactataccggcattggtaaatccttgtagacgataggcggacgctgaacacgctaacgatagtatcaataacgcaatcatgattttatggtattaataattaaccttatttttatgttcggtataaaaaaattattgatgtctacacatccttttgtaattgacatctatatatccttttgtataatcaactctaatcactttaacttttacagttttccctaccagtttatccctatattcaacatatctatccatatgcatcttaacactctctgccaagatagcttcagagtgaggatagtcaaaaagataaatatatagagcataatcattctcgtatactctgccctttattacatcacccgcattgggcaacgaataacaaaatgcaagcatcttgttaacgggctcgtaaattgggataaaaattatgtttttattgtcttatatctattttattcaagagaatattcaggaatttctttttccggttgtatctcgtcgcagtatatatcatttgtacattgtttcatattttttaatagtttacaccttttagtaggactagtatcgtacaattcatagctgtattttgaattccaatcacgcataaaaatatcttccaattgttgacgaagacctaatccatcatccggtgtaatattaatagatgctccacatgtatccgtaaagtaatttcctgtccaatttgaggtacctatataggccgttttatcggttaccatatatttggcatggtttaccctagaatacggaatgggaggatcagcatctggtacaataaatagctttacttctatatttatgtttttagattttagcatagcgatagatcttaaaaagtttctcatgataaacgaagatcgttgccagcaactaatcaatagcttaacggatacttgtctgtctatagcggatcttcttaattcatcttctatataaggccaaaacaaaattttacccgccttcgaataaataatagggataaagttcataacagatacataaacgaatttactcgcatttctaatacatgacaataaagcggttaaatcattggttctttccatagtacatagttgttgcggtgcagaagcaataaatacagagtgtggaacgccgcttacgttaatactaagaggatgatctgtattataatacgacggataaaagtttttccaattatatggtagattgttaactccaagataccagtatacctcaaaaatttgagtgagatccgctgccaagttcctattattgaagatcgcaatacccaattccttgacctgagttagtgatctccaatccatgttagcgcttcctaaataaatatgtgtattatcagatatccaaaattttgtatgaagaactcctcctaggatatttgtaatatctatgtatcgtacttcaactccggccatttgtagtctttcaacatcctttaatggtttgttagatttattaacggctactctaactcgtactcctcttttgggtaattgtacaatctcgtttaatattatcgtgccgaaattcgtacccacttcatccgataaactccaataaaaagatgatatatctagtgtttttgtggtattggatagaatttccctccacatgttaaatgtagacaaatatactttatcaaattgcatacctataggaatagtttctgtaatcactgcgattgtattatccggattcattttatttgttaaaagaataatcctatatcacttcactctattaaaaatccaagtttctatttctttcatgactgattttttaacttcatccgtttccttatgaagatgatgtttggcaccttcataaatttttatttctctattacaatttgcatgttgcatgaaataatatgcacctaaaacatcgctaatcttattgtttgttccctggagtatgagagtcgggggggtgttaatcttggaaattatttttctaaccttgttggtagccttcaagacctgactagcaaatccagccttaattttttcatgattgactaatgggtcgtattggtatttataaactttatccatatctctagatactgattctggacatagctttccgactggcgcatttggtgtgatggttcccataagtttggcagctagcagattcagtcttgaaacagcatctgcattaactagaggagacattagaatcattgctgtaaacaagtttggattatcgtaagaggctagctcccatggaatgacccaataagtagatttaatagttaccacgtgctgtaccaaagtcatcaatcatcattttttcaccattacttcttccatgtccaatatgatcatgtgagaatactaaaattcctaacgatgatatgttttcagctagttcgtcataacgtccagaatgtttaccagctccatgacttatgaatactaatgccttaggatatgtaataggtttccaatatttacaatatatgtaatcattgtccagattgaacatacagtttgcactcatgattcacgttatataactatcaatattaacagttcgtttgatgatcatattatttttatgttttattgataattgtaaaaacatacaattaaatcaatatagaggaaggagacggctactgtcttttgtaagatagtcatggcgactaaattagattatgaggatgctgttttttactttgtggatgatgataaaatatgtagtcgcgactccatcatcgatctaatagatgaatatattacgtggagaaatcatgttatagtgtttaacaaagatattaccagttgtggaagactgtacaaggaattgatgaagttcgatgatgtcgctatacggtactatggtattgataaaattaatgagattgtcgaagctatgagcgaaggagaccactacatcaattttacaaaagtccatgatcaggaaagtttattcgctaccataggaatatgtgctaaaatcactgaacattggggatacaaaaagatttcagaatctagattccaatcattgggaaacattacagatttgatgaccgacgataatataaacatcttgatactttttctagaaaaaaaattgaattgatgatataggggtcttcataacgcataattattacgttagcattctatatccgtgttaaaaaaaattatcctatcatgtatttgagagttttatatgtagcaaacatgatagctgtgatgccaataagctttagatattcacgcgtgctagtgttagggatggtattatctggtggtgaaatgtccgttatataatctacaaaacaatcatcgcatatagtatgcgatagtagagtaaacatttttatagtttttactggattcatacatcgtctacccaattcggttataaatgaaattgtcgccaatcttacacccaaccccttgttatccattagcatagtattaacttcgttatttatgtcataaactgtaaatgattttgtagatgccatatcatacatgatattcatgtccctattataatcattactaactttatcacaatatatgttgataatatctatatatgatctagtctttgtgggcaactgtctatacaagtcgtctaaacgttgtttactcatatagtatcgaacagccatcattacatggtcccgttccgttgatagataatcgagtatgttagtggacttgtcaaatctatataccatattttctggaagtggatatacatagtcgtgatcaacattattgctagcctcatcttctatatcctgtactataccattatctatatcatctacataatctatgatattattacacataaacatcgacaacatactattgtttattatctaagtcctgttgatccaaacccttgatctcctctatttgtactatctagagattgtacttcttccagttctggataatatatacgttgatagattagctgagctattctatctccagtatttacattaaacgtacattttccattattaataagaatgactcctatgtttcccctataatcttcgtctattacaccacctcctatatcaatgccttttagtgacagaccagacctaggagctattctaccatagcagaacttaggcatggacatactaatatctgtcttaattaactgtctttctcctggagggatagtataatcgtaagcgctatacaaatcatatccggcagcacccggcgattgcctagtaggagatttagctctgttagtttccttaacaaatctaactggtgagttaatattcatgttgaacataaaactaatattttatttcaaaattatttaccatcccatatattccatgaataagtgtgatgattgtacacttctatagtatctatatacgatccacgataaaatcctcctatcaatagcagtttattatccactatgatcaattctggattatccctcggataaataggatcatctatcagagtccatgtattgctggattcacaataaaattccgcatttctaccaaccaagaataaccttctaccgaacactaacgcgcatgatttataatgaggataataagtggatggtccaaactgccactgatcatgattgggtagcaaatattctgtagttgtatcagtttcagaatgtcctcccattacgtatataacattgtttatggatgccactgctggattacatctaggtttcagaagactcggcatattaacccaagcagcatccccgtggaaccaacgctcaacagatgtgggatttggtagacctcctactacgtataatttattgttagcgggtatcccgctagcatacagtctggggctattcatcggaggaattggaatccaattgtttgatatataatttaccgctatagcattgttatgtatttcattgttcatccatccaccgatgagatatactacttctccaacatgagtacttgtacacatatggaatatatctataatttgatccatgttcataggatactctatgaatggatacttgtatgatttgcgtggttgtttatcacaatgaaatattttggtacagtctagtatccattttacattatttatacctctgggagaaagataatttgacctgattacatttttgataaggagtagcagatttcctaatttatttcttcgctttatataccacttaatgacaaaatcaactacataatcctcatctggaacatttagttcatcgctttctagaataagtttcatagatagataatcaaaattgtctatgatgtcatcttccagttccaaaaagtgtttggcaataaagtttttagtatgacataagagattggatagtccgtattctatacccatcatgtaacactcgacacaatattcctttctaaaatctcgtaagataaagtttatacaagtgtagatgataaattctacagaggttaatatagaagcacgtaataaattgacgacgttatgactatctatatatacctttccagtatacgagtaaataactatagaagttaaactgtgaatgtcaaggtctagacaaaccctcgtaactggatctttatttttcgtgtatttttgacgtaaatgtgtgcgaaagtaaggagataactttttcaatatcgtagaattgactattatattgcctcctatggcatcaataattgttttgaatttcttagtcatagacaatgctaatatattcttacagtacacagtattgacaaatatcggcatttatgtttctttaaaagtcaacatctagagaaaaatgattatctttttgagacataactcccattttttggtattcacccacacgtttttcgaaaaaattagtttttccttccaatgatatattttccatgaaatcaaacggattggtaacattataaatttttttaaatcccaattcagaaatcaatctatccgcgacgaattctatatatgttttcatcatttcacaattcattcctataagtttaactggaagagccgcagtaagaaattcttgttcaatggatactgcatctgttataatagatctaacggtttcttcactcggtggatgcaataaatgtttaaacatcaaacatgcgaaatcgcagtgcagaccctcgtctctactaattagttcgttggaaaacgtgagtccgggcattaggccacgctttttaagccaaaatatggaagcgaatgatccggaaaagaagattccttctactgcagcaaaggcaataagtctctctccataaccggcgctgtcatgtatccacttttgagcccaatcggccttcttttttacacaaggcatcgtttctatggcattaaagagatagtttttttcattactatctttaacataagtatcgatcaaaagactatacatttccgaatgaatgttttcaatggccatctgaaatccgtagaaacatctagcctcggtaatctgtacttctgtacaaaatcgttccgccaaattttcattcactattccgtcactggctgcaaaaaacgccaatacatgttttataaaatatttttcgtctggtgttagtttattccaatcattgatatctttagatatatctacttcttccactgtccaaaatgatgcctctgcctttttatacatgttccagatgtcatgatattggattgggaaaataacaaatctatttggatttggtgcaaggatgggttccataactaaattaacaataacaataaattttttttcagttatctatatgcctgtacttggattttttgtacatcgatatcgccgcaatcactacaataattacaagtattattgatagcattgttattagtactatcataattaaattatctacattcatgggtgctgaataatcgttattatcatcattatcattttgtaattgtgacatcatactagataaatcgtttgcgagattgttgtgggaagcgggcatggaggatgcattatcattattatttaacgccttccatttggattcacaaatgttacgcacattcaacattttatggaaactataattttgtgaaaacaaataacaagaaaactcgtcatcgttcaaatttttaacgatagtaaaccgattaaacgtcgagctaatttctaacgctagcgactctgttggatatgggtttccagatatatatcttttcagttcccctacgtatctataatcatctgtaggaaatggaagatatttccatttatctactgttcctaatatcatatgtggtggtgtagtagaaccattaagcgcgaaagatgttatttcgcatcgtattttaacttcgcaataatttctggttagataacgcactctaccagtcaagtcaatgatattagcctttacagatatattcatagtagtcgtaacgatgactccatcttttagatgcgatactcctttgtatgtaccagaatcttcgtacctcaaactcgatatatttaaacaagttaatgagatattaacgcgttttatgaatgatgatatataaccagaagttttatcctcggtggctagcgctataaccttatcattataataccaactagtgtgattaatatgtgacacgtcagtgtgggtacaaatatgtacattatcgtctacgtcgtattcgatacatccgcatacagccaacaaatataaaatgacaaatactctaacgccgttcgtacccatcttgatgcggtttaataaatgttttgatttcaatttattgtaaaaaaagattcggttttatactgttcgatattctcattgcttatattttcatctatcatctccacacagtcaaatccgtggttagcatgcacctcatcaaccggtaaaagactatcggactcttctatcattataactctagaatatttaatttggtcattattaatcaagtcaattatcttatttttaacaaacgtgagtattttactcattttttataaaaacttttagaaatatacagactctatcgtgtgtctatatcttctttttatatccaatgtatttatgtctgatttttcttcatttatcatatataatggtccaaattctacacgtgcttcggattcatccagatcattaaggttcttataattgtaacatccttctcttccctcttctacatcttccttcttattcttattcttagcgtcacagaatctaccacagcaggatcccatgacgagcgtcatattaaactaatccattttcaattataatatatgattagtaatgaccattaaaataaaaaatattcttcataaccggcaagaaagtgaaaagttcacattgaaactatgtcagtagtatacatcatgaaatgatgatatatatatactctattttggtggaggattatatgatataattcgtggataatcatttttaagacacatttctttattcgtaaatcttttcacgttaaatgagtgtccatattttgcaatttcttcatatgatggcggtgtacgtggacgaggctgctcctgttcttgttgtggtcgccgactgtcgtgtctgcgtttagatccctccattatcgcgattgcgtagatggagtactattttataccttgtaattaaatttttttattaattaaacgtataaaaacgttccgtatctgtatttaagagccagatttcgtctaatagaacaaatagctacagtaaaaataactagaataattgctacacccactagaaaccacggatcgtaatacggcaatcggttttcgataataggtggaacgtatattttatttaaggacttaacaattgtctgtaaaccacaatttgcttccgcggatcctgtattaactatctgtaaaagcatatgttgaccgggcggagccgaacattctccgatatctaatttctgtatatctataatattattaacctccgcatacgcattacagttcttttctagcttggataccgcactaggtacatcgtctagatctattcctatttcctcagcgatagctcttctatccttttccggaagcaatgaaatcacttcaataaatgattcaaccatgagtgtgaaactaagtcgagaattactcatgcatttgttagttattcggagcgcgcaatttttaaactgtcctataacctctcctatatgaatagcacaagtgacattagtagggatagaatgttgagctaatttttgtaaataactatctataaaaagattatacaaagttttaaactctttagtttccgccatttatccagtctgagaaaatgtctctcataataaatttttccaagaaactaattgggtgaagaatggaaacctttaatctatatttatcacagtctgttttggtacacatgatgaattcttccaatgccgtactaaattcgatatctttttcgatttctggatatgtttttaataaagtatgaacaaagaaatggaaatcgtaataccagttatgtttaactttgaaattgttttttattttcttgttaatgattccagccacttgggaaaagtcaaagtcgtttaatgccgatttaatacgttcattaaaaacaaactttttatcctttagatgaattattattggttcattggaatcaaaaagtaagatattatcgggtttaagatctgcgtgtaaaaagttgtcgcaacagggtagttcgtagattttaatgtataacagagccatctgtaaaaagataaactttatgtattgtaccaaagatttaaatcctaatttgatagctaactcggtatctactttatctgccgaatacagtgctaggggaaaaattataatgtttcctctttcatattcgtagttagttctcttttcatgttcgaaaaagtgaaacatgcggttaaaatagtttataacattaatattactgttaataactgccggataaaagtgggatagtaatttcacgaatttgatactgtcctttctctcgttaaacgcctttaaaaaaactttagaagaatatctcaatgagagttcctgaccatccatagtttgtatcaataatagcaacatatgaagaacacgtttatacagagtatgtaaaaatgttaatttatagtttaatcccatggcccacgcacacacgattaattttttttcatctccctttagattgttgtatagaaatttgggtactgtgaactccgccgtagtttccatgggactatataattttgtggcctcgaatacaaattttactacatagttatctatcttaaagactataccatatcctcctgtagatatgtgataaaaatcgtcgtttataggataaaatcgtttatccttttgttggaaaaaggatgaattaatgtaatcattctcttctatctttagtagtgtttccttattaaaattcttaaaataatttaacaatctaactgacggagcccaattttggtgtaaatctaattgggacattatattgttaaaatacaaacagtctcctaatataacagtatctgataatctatggggagacatccattgatattcaggggatgaatcattggcaacacccatttattgtacaaaaagccccaatttacaaacgaaagtccaggtttgatagagacaaacaattaactattttgtctctgtttttaacacctccacagtttttaatttctttagtaatgaaattattcacaatatcagtatcttctttatctaccagagattttactaacttgataaccttggctgtctcattcaatagggtagtaatatttgtatgtgtgatattgatatctttttgaattgtttcttttagaagtgattctttgatggtgccagcatacgaattacaataatgcagaaactcggttaacatgcaggaattatagtaagccaattccaattgttgcctgtgttgtattagagtgtcaatatgagcaatggtgtccttgcgtttctctgatagaatgcgagcagcgattttggcgttatcatttgacgatatttctggaatgacgaatcctgtttctactaactttttggtaggacaaagtgaaacaatcaagaagatagcttctcctcctatttgtggaagaaattgaactcctctagatgatctactgacgatagtatctccttgacagatattggaccgaattacagaagtacctggaatgtaaagccctgaaaccccctcattttttaagcagattgttgccgtaaatcctgcactatgcccaagatagagagctcctttggtgaatccatctctatgtttcagtttaaccaagaaacagtcagctggtctaaaatttccatctctatctaatacagcatctaacttgatgtcaggaactatgaccggtttaatgttatatgtaacattgagtaaatccttaagttcataatcatcactgtcatcagttatgtacgatccaaacaatgtttctaccggcatagtggatacgaagatgctatccatcagaatgtttccctgattagtattttctatatagctattcttctttaaacgattttccaaatcagtaactatgttcatttttttaggagtaggacgcctagccagtatggaagaggattttctagatcctctcttcaacatctttgatctcgatggaatgcaaaaccccatagtgaaacaaccaacgataaaaataatattgtttttcactttttataattttaccatctgactcatggattcattaatatctttataagagctactaacgtataattctttataactgaactgagatatatacaccggatctatggtttccataattgagtaaatgaatgctcggcaataactaatggcaaatgtatagaacaacgaaattatactagagttgttaaagttaatattttctatgagctgttccaataaattatttgttgtgactgcgttcaagtcataaatcatcttgatactatccagtaaaccgtttttaagttctggaatattatcatcccattgtaaagcccctaattcgactatcgaatatcctgctctgatagcagtttcaatatcgacggacgtcaatactgtaataaaggtggtagtattgtcatcatcgtgataaactacgggaatatggtcgttagtaggtacggtaactttacacaacgcgatatataactttccttttgtaccatttttaacgtagttgggacgtcctgcagggtattgttttgaagaaatgatatcgagaacagatttgatacgatatttgttggattcctgattattcactataatataatctagacagatagatgattcgataaatagagaaggtatatcgttggtaggataatacatccccattccagtattctcggatactctattgatgacactagttaagaacatgtcttctattctagaaaacgaaaacatcctacatggactcattaaaacttctaacgctcctgattgtgtctcgaatgcctcgtacaaggatttcaaggatgccatagattctttgaccaacgatttagaattgcgtttagcatctgatttttttattaaatcgaatggtcggctctctggtttgctaccccaatgataacaatagtcttgtaaagataaaccgcaagaaaatttatacgcatccatccaaataaccctagcaccatcggatgatattaatgtattattatagattttccatccacagttattgggccagtatactgttagcaacggtatatcgaatagattactcatgtaacctactagaatgatagttcgtgtactagtcataatatctttaatccaatctaagaaatttaaaattagattttttacactgttaaagttaacaaaggtattacccggatacgtggatatcatatatggcattggtccattatcagtaatagctccataaactgatacggcgatggtttttatatgtgtttgatctaacgaggaagaaattcgcgcccacaattcatctctagatatgtatttaatatcaaacggtaacacatcaatttcgggacgcgtatatgtttctaaatttttaatccaaatataatgatgacctatatgccctattatcatactgtcaactatagtacacctagagaacttacgatacatctgtttcctgtaatcgttaaattttacaaatctataacatgctaaaccttttgacgacagccattcattaatttctgatatggaatctgtattctcgataccgtatcgttctaaagccagtgctatatctccctgttcgtgggaacgctttcgtataatatcgatcaacggataatctgaagtttttggagaataatatgactcatgatctatttcgtccataaacaatctagacataggaattggaggcgatgatcttaattttgtgcaatgagtcgtcaatcctataacttctaatcttgtaatattcatcatcgacataatactatctatgttatcatcgtatattagtataccatgaccttcttcatttcgtgccaaaatgatatacagtcttaaatagttacgcaatatctcaatagtttcataattgttagctgttttcatcaaggtttgtatcctgtttaacatgatggcgttctataacgtctctattttctatttttaattttttaaatttttaacgatttactgtggctagatacccaatctctctcaaatatttttttagcctcgcttacaagctgtttatctatactattaaaactgacgaatccgtgattttggtaatgggttccgtcgaaatttgccgaagtgatatgaacatattcgtcgtcgactatcaacaattttgtattattctgaatagtgaaaaccttcacagatagatcattttgaacacacaacgcatctagacttttggcggttgccatagaatatacgtcgttcttatcccaattaccaactagaagtctgatcttaactcctctattaatggctgcttctataatggagttgtaaatgtcgggccaatagtagctattaccgtcgacacgtgtagtgggaactatggccaaatgttcaatatctatactagtcttagctgacctgagtttatcaataactacatcggtatctagatctctagaatatcccaataggtgttccggagaatcagtaaagaacactccacctataggattcttaatatgatacgcagtgctaactggcaaacaacaagccgcagagcataaattcaaccatgaattttttgcgctattaaaggctttaaaagtatcaaatcttctacgaagatctgtggccagcgggggataatcagaatatacacctaacgttttaatcgtatgtatagatcctccagtaaatgacgcgtttcctacataacatctttcatcatctgacacccaaaaacaaccgagtagtagtcccacattattttttttatctatattaacggttataaaatttatatccgggcagtgactttgtagctctcccagatttcttttccctcgttcatctagcaaaactattattttaatccctttttcagatgcctcttttagtttatcaaaaataagcgctcccctagtcgtactcagaggattacaacaaaaagatgctatgtatatatatttcttagctagagtgataatttcgttaaaacattcaaatgttgttaaatgatcggatctaaaatccatattttctggtagtgtttctaccagcctacattttgctcccgcaggtaccgatgcaaatggccacatttagttaacataaaaacttatacatcctgttctatcaacgattctagaatatcatcggctatatcgctaaaattttcatcaaagtcgacatcacaacctaactcagtcaatatattaagaagttccatgatgtcatcttcgtctatttctatatccgtatccattgtagattgttgaccgattatcgagtttaaatcattactaatactcaatccttcagaatacaatctgtgtttcattgtaaatttataggcggtgtatttaagttggtagattttcaattatgtattaatatagcaacagtagttcttgctcctccttgattctagcatcctcttcattattttcttctacgtacataaacatgtccaatacgttagacaacacaccgacgatggcggccgctacagacacgaatatgactaaaccgatgaccatttaaaaacccctctctagctttcacttaaactgtatcgatcattcttttagcacatgtataatataaaaacattattctatttcgaatttaggcttccaaaaatttttcatccgtaaaccgataataatatatatagacttgttaatagtcggaataaatagattaatgcttaaactatcatcatctccacgattagagatacaatatttacattctttttgctgtttcgaaactttatcaatacacgttaatacaaacccaggaaggagatattgaaactgaggctgttgaaaatgaaacggtgaatacaataattcagataatgtaaaatcatgattccgtattctgatgatattagaactgctaatggatgtcgatggtatgtatctaggagtatctattttaacaaagcatcgatttgctaatatacaattatccttttgattaattgttattttattcatattcttaaaaggtttcatatttatcaattcttctacattaaaaatttccatttttaatttatgtagccccgcaatactcctcattacgtttcattttttgtctataatatccattttgttcatctcggtacatagattatccaattgagaagcgcatttagtagttttgtacattttaagtttattgacgaatcgtcgaaaactagttatagttaacattttattatttgataccctgatattaatacccctgccgttactattatttataactgatgtaatccacgtaacattggaattaactatcgatagtaatgcatcgacgcttccaaaattgtctattataaactcaccgataatttttttattgcatgttttcatattcattaggattatcaaatctttaatcttattacgattgtatgcgttgatattacaagacgtcattctaaaagacggaggatctccatcaaatgccagacaatcacgtacaaagtacatggaaataggttttgttctattgcgcatcatagatttatatagaacacccgtagaaatactaatttgttttactctataaaatactaatgcatctatttcatcgttttgtataacgtctttccaagtgtcaaattccaaatttttttcattgatagtaccaaattcttctatctctttaactacttgcatagataggtaattacagtgatgcctacatgccgttttttgaaactgaatagatgcgtctagaagcgatgctacgctagtcacaatcaccactttcatatttagaatatatatatgtaaaaatatagtagaatttcattttgtttttttctatgctataaatgaattctcattttgcatctgctcatactccgttttatattaataccaaagaaggaagatatctggttctaaaagccgttaaagtatgcgatgttagaactgtagaatgcgaaggaagtaaagcttcctgcgtactcaaagtagataaaccctcatcgcccgcgtgtgagagaagaccttcgtccccgtccagatgcgagagaatgaataaccctggaaaacaagttccgtttatgaggacggacatgctacaaaatatgttcgcggctaatcgcgataatgtagcttctagacttttgtcctaaaatactattatatccttttcgatattaataaatccgtgtcgtccaggttttttatctctttcagtatgtgaatagataggtattttatctctattcatcatcgaatttaagagatccgataaacattgtttgtattctccagatgtcagcatctgatacaacaatatatgtgcacataaacctctggcacttatttcatgtaccttccccttatcactaaggagaatagtatttgagaaatatgtatacatgatattatcatgaattagatatacagaatttgtaacactctcgaaatcacacgatgtgtcggcgttaagatctaatatatcactcgataacacattttcatctagatacactagacattttttaaagctaaaatagtctttagtagtaacagtaactatgcgattattttcatcgatgatacatttcatcggcatattattacgcttaccatcaaagactataccatgtgtatatctaacgtattctagcatggttgccatacgcgcattaaacttttcaggatctttggatagatcttccaatctatctatttgagaaaacatttttatcatgttcaatagttgaaacgtcggatccactatatagatattatctataaagattttaggaactacgttcatggtatcctggcgaatattaaaactatcaatgatatgattatcgttttcatcttttatcaccatatagtttctaagatatgggattttacttaatataatattatttcccgtgataaattttattagaaaggccaaatctataagaaaagtcctagaattagtctgaagaatatctatatcgccgtatagtatatttggattaattagatatagagaatatgatccgtaacatatacaacttttattatggcgtctaagatattcttccatcaacttattaacatttttgactagggaagatacattatgacgtcccattacttttgccttgtctattactgcgacgttcatagaatttagcatatctcttgccaattcttccattgatgttacattataagaaattttagatgaaattacatttggagctttaatagtaagaactcctaatatgtccgtgtatgtggtcactaatacagattgtagttctataatcgtaaataatttacctatattatatgtttgagtctgtttagaaaagtagctaagtatacgatcttttatttctgatgcagatgtattaacatcggaaaaaaatctttttttattcttttttactaaagatacaaatatgtctttgttaaaaacagttattttctgaatatttctagcttgtaattttaacatatgatattcgttcacactaggtactctgcctaaataggtttctataatctttaatgtaatattaggaaaagtattctgatcaggattcctattcattttgaggatttaaaactctgattattgtctaatatggtctctacgcaaactttttcacagagcgatagagtttttgataactcgtttttcttaagaaatataaaactactgtctccagagctcgctctatcttttattttatctaattcgatacaaactcctgatactggttcagaaagtaattcattaattttcagtcctttatagaagatatttaatatagataatacaaaatcttcagtttttgatatcgatctgattgatcctagaactagatatattaataacgtgctcattaggcagtttatggcagcttgataattagatatagtatattccagttcatatttattagataccgcattgcccagattttgatattctatgaattcctctgaaaataaatccaaaataactagacattctattttttgtggattagtgtactctcttccctctatcatgttcactactggtgtccacgatgataaatatctagagggaatataatatagtccataggatgccaatctagcaatgtcgaataactgtaattttattcttcgctcttcattatgaattgattcttgaggtataaacctaacacaaattatattattagacttttcgtatgtaatgtctttcatgttataagtttttaatcctggaatagaatctattttaatgaggcttttaaacgcagagttctccaacgagtcaaagcataatactctgttgtttttcttatatacgatgttacgattttcttctttgaatggaataggtttttgaattagtttataattacaacataatagataaggaagtgtgcaaatagtacgcggaaaaaacataatagctcccctgttttcatccatggttttaagtaaatgatcactggcttctttagtcaatggatattcgaacattaaccgtttcatcatcattggacagaatccatatttcttaatgtaaagagtgatcaaatcattgtgtttattgtaccatcttgttgtaaatgtgtattcggttatcggatctgctcctttttctattaaagtatcgatgtcgatctcgtctaagaattcaactatatcgacatatttcatttgtatacacataaccattactaacgtagaatgtataggaagagatgtaacgggaacagggtttgttgattcgcaaactattctaatacataattcttctgttaatacgtcttgcacgtaatctattatagatgccaagatatctatataattattttgtaagatgatgttaactatgtgatctatataagtagtgtaataattcatgtatttcgatatatgttccaactctgtctttgtgatgtctagtttcgtaatatctatagcatcctcaaaaaatatattcgcatatattcccaagtcttcagttctatcttctaaaaaatcttcaacgtatggaatataataatctattttacctcttctgatatcattaatgatatagtttttgacactatcttctgtcaattgattcttattcactatatctaagaaacggatagcgtccctaggacgaactactgccattaatatctctattatagcttctggacataattcatctattataccagaattaatgggaactattccgtatctatctaacatagttttaagaaagtcagaatctaagacttgatgttcatatattggttcatacatgaaatgatctctattgatgatagtgactatttcattctctgaaaattggtaactcattctatatatgctttccttgttgatgaaggatagaatatactcaatagaatttgtaccaacaaactgttctcttatgaatcgtatatcatcatctgaaataatcatgtaaggcatacatttaacaattagagacttgtctcctgttatcaatatactattcttgtgataatttatgtgtgaggcaaatttgtccacgttctttaattttgttatagtagatatcaaatccaatggagctacagttcttggcttaaacagatatagtttttctggaacaaattctacaacattattataaaggactttgggtaaataagtgggatgaaatcctattttaattaatgcgatagccttgtcctcgtgcagatatccaaacgcttttgtgatagtatggcattcattgtctagaaacgctctacgaatatctgtgacagatatcatctttagagaatatactagtcgcgttaatagtactacaatttgtattttttaatctatctcaataaaaaaattaatatgtatgattcaatgtataactaaactactaactgttattgataactagaatcagaatctaatgatgacgtacccaagaagtttatctactgccaatttagctgcattatttttagcatctcgtttagattttccatctgccttatcgaatactcttccgtcgatatctacacaggcataaaatgtaggagagttactaggcccaactgattcaatacgaaaagaccaatctctcttagttatttggcagtactcattaataacggtgacagggttagcatctttccaatcaataatttttttagccggaataacatcatcaaaagacttatgatcctctctcattgatttttcgcgggatacatcatctattatgacgtcagccataacatcagcatccggcttatccgcctccgttgtcataaaccaacgaggaggaatatcgtcggagctgtacaccatagcactacgttgaagatcgtacagagctttattaacttctcgcttctccatattaagttgtctagttagttgtgcagcagtagctccttcgattccaatggttttaatagcctcacacacaatctctgcgttagaacgttcgtcgatatagattttagacatttttagagagaactaacacaaccagcaataaaactgaacctactttatcatttttttattcatcatcctctggtggttcgtcgttcctatcaaatgtagctctgattaacccgtcatctataggtgatgctggttctggagattctggaggagatggattattatctggaagaatctctgttatttccttgttttcatgtatcgattgcgttgtaacattaagattgcgaaatgctctaaatttgggaggcttaaagtgttgtttgcaatctctacacgcgtgtctaactagtggaggttcgtcagctgctctagtttgaatcatcatcggcgtagtattcctacttttacagttaggacacggtgtattgtatttctcgtcgagaacgttaaaataatcgttgtaactcacatcctttattttatctatattgtattctactcctttcttaatgcattttataccgaataagagatagcgaaggaattctttttcggtgccgctagtacccttaatcatatcacatagtgttttatattccaaatttgtggcaatagacggtttatttctatacgatagtttgtttctggaatcctttgagtattctataccaatattattctttgattcgaatttagtttcttcgatattagattttgtattacctatattcttgatgtagtactttgatgatttttccatggcccattctattaagtcttccaagttggcatcatccacatattgtgatagtaattctcggatatcagtagcggctaccgccattgatgtttgttcattggatgagtaactactaatgtatacattttccatttataacacttatgtattaactttgttcatttatattttttcattattatgttgatattaacaaaagtgaatatatatatatgttaataattgtattgtggttatacggctacaattttataatgagtgaaagtcagtgtccgatgatcaatgacgatagctttactctgaaaagaaagtatcaaatcgatagtgcggagtcaacaataaaaatggataagaagaggataaagtttcagaatagagccaaaatggtaaaagaaataaatcagacaataagagcagcacaaactcattacgagacattgaaactaggatacataaaatttaagagaatgattaggactactactctagaagatatagcaccatctattccaaataatcagaaaacttataaactattctcggacatttcagccatcggcaaagcatcacagaatccgagtaagatggtatatgctctgctgctttacatgtttcccaatttgtttggagatgatcatagattcattcgttatagaatgcatccaatgagtaaaatcaaacacaagatcttctctcctttcaaacttaatcttattagaatattagtggaagaaagattctataataatgaatgcagatctaataaatggaaaataattggaacacaagttgataaaatgttgatagctgaatctgataaatatacaatagatgcaaggtataacctaaaacccatgtatagaatcaagggagaatctgaagaagataccctcttcatcaaacagatggtagaacaatgtgtgacatcccaggaattggtggaaaaagtgttgaagatactgtttagagatttgttcaagagtggagaatacaaagcgtacagatacgatgatgatgtagaaaatggattcattggattggatacactaaaattaaacattgttcatgatatagttgaaccatgtatgcctgttcgtaggccagtggctaagatactgtgtaaagaaatggtaaataaatactttgagaatccgctacatattattggtaaaaatcttcaagagtgcattgactttgttagtgaataggcatttcatctttctccaatactaattcaaattgttaaattaataatggatagtataaatagttattagttataagatagtaaaaataattattagaataagagtgtagtatcatagataactctcttctataaaaatggattttattcgtagaaagtatcttatatacacagtagaaaataatatagattttttaaaggatgatacattaagtaaagtaaacaattttaccctcaatcatgtactagctctcaagtatctagttagcaattttcctcaacacgttattactaaggatgtattagctaataccaatttttttgttttcatacatatggtacgatgttgtaaagtgtacgaagcggttttacgacacgcatttgatgcacccacgttgtacgttaaagcattgactaagaattatttatcgtttagtaacacaatacaatcgtacaaggaaaccgtgcataaactaacacaagatgaaaaatttttagaggttgccgaatacatggacgaattaggagaacttataggcgtaaattatgacttagttcttaatccattatttcacggaggggaacccatcaaagatatggaaatcatttttttaaaactgtttaagaaaacagacttcaaagttgttaaaaaattaagtgttataagattacttatttgggcatacctaagcaagaaagatacaggcatagagtttgcggataatgatagacaagatatatatactctatttcaacaaactggtagaatcgtccatagcaatctaacagaaacgtttagagattatatctttcccggagataagactagctattgggtgtggttaaacgaaagtatagctaatgatgcggatatcgttcttaatagacacgccattaccatgtatgataaaattcttagttatatatactctgagataaaacaaggacgcgttaataaaaacatgcttaagttagtttatatctttgagcctgaaaaagatatcagagaacttctgctagaaatcatatatgatattcctggagatatcctatctattattgatgcaaaaaacgacgattggaaaaaatattttattagtttttataaagctaattttattaacggtaatacatttattagtgatagaacgtttaacgaggacttattcagagttgttgttcaaatagatcccgaatatttcgataatgaacgaattatgtctttattctctacgagtgctgcggacattaaacgatttgatgagttagatattaataacagttatatatctaatataatttatgaggtgaacgatatcacattagatacaatggatgatatgaagaagtgtcaaatctttaacgaggatacgtcgtattatgttaaggaatacaatacatacctgtttttgcacgagtcggatcccatggtcatagagaacggaatactaaagaaactgtcatctataaaatccaagagtagacggctgaacttgtttagcaaaaacattttaaaatattatttagacggacaattggctcgtctaggtcttgtgttagatgattataaaggagacttgttagttaaaatgataaaccatcttaagtctgtggaggatgtatccgcattcgttcgattttctacagataaaaaccctagtattcttccatcgctaatcaaaactattttagctagttataatatttccatcatcgtcttatttcaaaggtttttgagagataatctatatcatgtagaagaattcttggataaaagcatccatctaaccaagacggataagaaatatatacttcaattgataagacacggtagatcatagaacagaccaaatatattattaataatttggtatatacatagatataattatcacacatttttgataaatgggaactgctgcaacaattcagactcccaccaaattaatgaataaagaaaatgcagaaatgattttggaaaaaattgttgatcatatagttatgtatattagtgacgaatcaagtgattcagaaaataatcctgaatatattgattttcgtaacagatacgaagactatagatctctcattataaaaagtgatcacgagtttgtaaagctatgtaaaaatcatgcggagaaaagttctccagaaacgcaacaaatgattatcaaacacatatacgaacaatatcttattccagtatctgaagtactattaaaacctataatgtccatgggtgacataattacatataacggatgtaaagacaatgaatggatgctagaacaactctctaccctaaactttaacaatctccgcacatggaactcatgtagcataggcaatgtaacgcgtctgttttatacattttttagttatctgatgaaagataaactaaatatataagtataatcccattctaatactttaacctgatgtattagcatcttattagaatattaacctaactaaaagacataacataaaaactcattacatagttgataaaaagcggtaggatataaatattatggctgccaccgttccgcgttttgacgacgtgtacaaaaatgcacaaagaagaattctagatcaagaaacattttttagtagaggtctaagtagaccgttaatgaaaaacacatatctatttgataattacgcgtatggatggataccagaaactgcaatttggagtagtagatacgcaaacttagatgcaagtgactattatcccatttcgttgggattacttaaaaagttcgagtttctcatgtctctatataaaggtcctattccagtatacgaagaaaaagtaaatactgaattcattgctaatggatctttctccggtagatacgtatcatatcttagaaagttttctgctcttccaacaaacgagtttattagttttttgttactgacttccattccaatctataatatcttgttctggtttaaaaatactcagtttgatattactaaacacacattattcagatacgtctatacagataatgccaaacacctggcgttggctaggtatatgtatcaaacaggagactataagcctttgtttagtcgtctcaaagagaattatatatttaccggtcccgttccaatatgtatcaaagatatagatcaccctaatcttagtagagcaagaagtccatccgattatgagacattagctaatattagtactatattgtactttaccaagtatgatccggtattaatgtttttattgttttacgtacctgggtattcaattactacaaaaattactccagccgtagaatatctaatggataaactgaatctaacaaagagcgacgtacaactgttgtaaattattttatgcttcgtaaaatgtaggttttgaaccaaacattctttcaaagaatgagatgcataaaactttattatccaatagattgactatttcggacgtcaatcgtttaaagtaaacttcgtaaaatattctttgatcactgccgagtttaaaacttctatcgataattgtttcatatgttttaatatttacaagttttttggtccatggtccattaggacaaatatatgcaaaataatatcgttctccaagttctatagtctctggattatttttattatattcagtaaccaaatacatattagggttatctgcggatttataatttgagtgatgcattcgactcaacataaataattctagaggagacgatctactatcaaattcggatcgtaaatctgtttctaaagaacggagaatatctatacatacctgattagaattcatccgtccttcagacaacatctcagacagtctggttttgtacatcttaatcatattcttatgaaacttggaaacatctcttctagtttcactagtacctttattaattctctcaggtacagattttgaattcgacgatgctgagtatttcatcgttgtatatttcttcttcgattgcataatcagattcttatataccgcctcaaactctattttaaaattattaaacaatactctattattaatcagtcgttctaactctttcgctatttctatagacttatctacatcttgactgtctatctctgtaaacacggagtcggtatctccatacacgctacgaaaacgaaatctgtaatctataggcaacgatgttttcacaatcggattaatatctctatcgtccatataaaatggattacttaatggattggcaaaccgtaacataccgttagataactctgctccatttagtaccgattctagatacaagatcattctacgtcctatggatgtgcaactcttagccgaagcgtatgagtatagagcactatttctaaatcccatcagaccatatactgagttggctactatcttgtacgtatattgcatggaatcatagatggccttttcagttgaactggtagcctgttttagcatctttttatatctggctctctctgccaaaaatgttcttaatagtctaggaatggttccttctatcgatctatcgaaaattgctatttcagagatgaggttcggtagtctaggttcacaatgaaccgtaatatatctaggaggtggatatttctgaagcaatagctgattatttatttcttcttccaatctattggtactaacaacgacaccgactaatgtttccggagatagatttccaaagatacacacattaggatacagactgttataatcaaagattaatacattattactaaacattttttgttttggagcaaataccttaccgccttcataaggaaacttttgttttgtttctgatctaactaagatagttttagtttccaacaatagctttaacagtggacccttgatgactgtactcgctctatattcgaataccatggattgaggaagcacatatgttgacgcacccgcgtctgtttttgtttctactccataatactcccacaaatactgacacaaacaagcatcatgaatacagtatctagccatatctaaagctatgtttagattataatccttatacatctgagctaaatcaacgtcatcctttccgaaagataatttatatgtatcattaggtaaagtaggacataatagtacgactttaaatccattttcccaaatatctttacgaattactttacatataatatcctcatcaacagtcacataattacctgtggttaaaacctttgcaaatgcagcggctttgcctttcgcgtctgtagtatcgtcaccgatgaacgtcatttctctaactcctctatttaatactttacccatgcaactgaacgcgttcttggatatagaatccaatttgtacgaatccaatttttcaaatttttgaatgaatgaatatagatcgaaaaatatagttccattattgttattaacgtgaaacgtagtattggccatgccgcctactcccttatgactagactgatttctctcataaatacagagatgtacagcttcctttttgtccggagatctaaagataattttctctcctgttaataactctagacgattagtaatatatctcagatcaaagttatgtccgttaaaggtaacgacgtagtcgaacgttagttccaacaattgtttagctattcgtaacaaaactatttcagaacatagaactagttctcgttcgtaatccatttccattagtgactgtatcctcaaacatcctctatcgacggcttcttgtatttcctgttccgttaacatctcttcattaatgagcgtaaacaataatcgtttaccacttaaatcgatataacagtaacttgtatgcgagattgggttaataaatacagaaggaaacttcttatcgaagtgacactctatatctagaaataagtacgatcttgggatatcgaatctaggtatttttttagcgaaacagttacgtggatcgtcacaatgataacatccattgttaatctttgtcaaatattgctcgtccaacgagtaacatccgtctggagatatcccgttagaaatataaaaccaactaatattgagaaattcatccatggtggcattttgtatgctgcgtttctttggctcttctatcaaccacatatctgcgacggagcattttctatctttaatatctagattataacttattgtctcgtcaatgtctatagttctcatctttcccaacggcctcgcattaaatggaggaggagacaatgactgatatatttcgtccgtcactacgtaataaaagtaatgaggaaatcgtataaatacggtctcaccatttcgacatctggatttcagatataaaaatctgttttcaccgtgactttcaaaccaattaatgcaccgaacatccatttatagaatttagaaatatattttcatttaaatgaatcccaaacattggggaagagccgtatggaccattatttttatagtactttcgcaagcgggtttagacggcaacatagaagcgtgtaaacgaaaactatatactatagttagcactcttccatgtcctgcatgtagacggcacgcgactatcgctatagaggacaataatgtcatgtctagcgatgatctgaattatatttattattttttcatcagattatttaacaatttggcatctgatcccaaatacgcgatcgatgtgacaaaggttaaccctttataaacttaacccattataaaacttatgattagtcacaactgaaataaccgcgtgattattttttggtataattctacacggcatggtttctgtgactatgaattcaacccccgttacattagtgaaatctttaacaaacagcaagggttcgtcaaagacataaaactcattgtttacaatcgaaatagaccccctatcacacttaaaataaaaaatatccttatcctttaccaccaaataaaattctgattggtcaatgtgaatgtattcacttaacagttccacaaatttatttattaactccgaggcacatacatcgtcggtattttttatggcaaactttactcttccagcatccgtttctaaaaaaatattaacgagttccatttatatcatccaatattattgaaatgacgttgatggacagatgatacaaataagaaggtacggtacctttgtccaccatctcctccaattcatgctctattttgtcattaactttaatgtatgaaaacagtacgccacatgcttccatgacagtgtgtaacactttggatacaaaatgtttgacattagtataattgttcaagactgtcaatctataatagatagtagctataatatattctatgatggtattgaagaagatgacaaccttggcatattgatcatttaacacagacatggtatcaacagatagcttgaatgaaagagaatcagtaattggaataagcgtcttctcgatagagtgtccgtataccaacatgtctgatattttgatgtattccattaaattatttagttttttctttttattctcgttaaacagcatttctgtcaacggaccccaacatcgttgaccgattaagttttgattgatttttccgtgtaaggcgtatctagtcagatcgtatagcctatccaataatccatcatctgtgcgtagatcacatcgtacactttttaattctctatagaagagcgacagacatctggagcaattacagacagcaatttctttattctctacagatgtaagatacttgaagacattcctatgatgatgcagaattttggataacacggtattgatggtatctgttaccataattcctttgatggctgatagtgtcagagcacaagatttccaatctttgacaatttttagcaccattatctttgttttgatatctatatcagacagcatggtgcgtctgacaacacagggattaagacggaaagatgaaatgattctctcaacatcttcaatagataccttgctattttttctggcattatctatatgtgcgagaatatcctctagagaatcagtatcctttttgatgatagtggatctcaatgacatgggacgtttaaaccttcttattctatcaccagattgcatggtgatttgtcttctttcttttatcataatgtaatctctaaattcatcggcaaattgtctatatctaaaatcataatatgagatgtttacctctacaaatatctgttcgtccaatgttagagtatttacatcagttttgtattccaaattaaacatggcaacggatttaattttatattcctctattaagtcctcgtcgataataacagaatgtagataatcatttaatccatcgtacatggttggaagatgcttgttgacaaaatctttaattgtcttgatgaaggtgggactatatctaacatcttgattaataaaatttataacattgtccataggatactttgtaactagttttatacacatctcttcatcggtaagtttagacagaatatcgtgaacaggtggtatattatattcatcagatatacgaagaacaatgtccaaatctatattgtttaatatattatatagatgtagcgtagctcctacaggaatatctttaactaagtcaatgatttcatcaaccgttagatctattttaaagttaatcatataggcattgatttttaaaaggtatgtagccttgactacattctcattaattaaccattccaagtcactgtgtgtaagaagattatattctatcataagcttgactacatttggtcccgataccattaaagaattcttatgatataaggaaacagcttttaggtactcatctactctacaagaattttggagagccttaacgatatcagtgacgtttattatttcaggaggaaaaaacctaacattgagaatatcggaattaatagcttccagatacagtgattttggcaatagtccgtgtaatccataatccagtaacacgagctggtgcttgctagacaccttttcaatgtttaatttttttgaaataagctttgataaagccttcctcgcaaattccggatacatgaacatgtcggcgacatgattaagtattgttttttcattattttctcaataccccaatagatgatagaatatcacccaatgcgtccatgttgtctatttccaacaggtcgctatatccaccaatagaagtttttccaaaaaagattctaggaacagttctaccaccagtaatttgttcaaaatagtcacgcaattcattttcgggtttaaattctttaatatcgacaatttcatacgctcctcttttgaaactaaacttatttagaatatccagtgcatttctacaaaaaggacatgtatacttgacaaaaattgtcactttgttattggccaacctttgttgtacaaattcctcggccattttaatatttaagtgatataaaactatctcgacttatttaactctttagtcgagatatatggacgcagatagctatatgatagccaactacagaaggcaaacgctataaaaaacataattacgacgagcatatttataaatatttttattcagcattacttgatatagtaatattaggcacagtcaaacattcaaccactctcgatacattaactctctcattttctttaacaaattctgcaatatcttcgtaaaaagattcttgaaactttttagaatatctatcgactctagatgaaatagcgttcgtcaacatactatgttttgtatacataaaggcgcccattttaacagtttctagtgacaaaatgctagcgatcctaggatcctttagaatcacatagattgacgattcgtctctcttagtaactctagtaaaataatcatacaatctagtacgcgaaataatattatccttgacttgaggagatctaaacaatctagttttgagaacatcgataagttcatcgggaatgacatacatactatctttaatagaactcttttcatccagttgaatggattcgtccttaaccaactgattaatgagatcttctattttatcattttccagatgatatgtatgtccattaaagttaaattgtgtagcgcttctttttagtctagcagccaatactttaacatcactaatatcgatatacaaaggagatgatttatctatggtattaagaattcgtttttcgacatccgtcaaaaccaattcctttttgcctgtatcatccagttttccatcctttgtaaagaaattattttctactagactattaataagactgataaggattcctccataattgcacaatccaaactttttcacaaaactagactttacaagatctacaggaatgcgtacttcaggttttttagcttgtgattttttcttttgcggacattttctagtaaccaactcatctaccatttcattgattttagcagtgaaataagctttcaatgcacgggcactgatactattgaaaacgagttgatcttcaaattccgccatttaagttcaccaaacaacttttaaatacaaatatatcaatagtagtagaataagaactataaaaaaaataataattaaccaataccaaccccaacaaccggtattattagttgatgtgactgttttctcatcacttagaacagatttaacaatttctataaagtctgtcaaatcatcttccggagaccccataaatacaccaaatatagcggcgtacaacttatccatttatacattgaatattggcttttctttatcgctatcttcatcatattcatcatcaatatcaacaagtcccagattacgagccagatcttcttctacattttcagtcattgatacacgttcactatctccagagagtccgataacgttagccaccacttctctatcaatgattagtttcttgagcgcgaaagtaatttttgtttccgttccggatctatagaagacgataggtgtgataattgccttagccaattgtctttctcttttactgagtgattctagttcaccttctatagatctgagaatggatgattctccagtcgaaacatattctaccatggatccgtttaatttgttgatgaagatggattcatccttaaatgttttctctgtaatagtttccaccgaaagactatgcaaagaatttggaatgcgttccttgtgcttaatgtttccatagacggcttctagaagttgatacaacataggactagccgcggtaacttttatttttagaaagtatccatcgcttctatcttgtttagatttatttttataaagtttagtctctccttccaacataataaaagtggaagtcatttgactagataaactatcagtaagttttatagagatagacgaacaattagcgtattgagaagcatttagtgtaacgtattcgatacattttgcattagatttactaatcgattttgcatactctataacacccgcacaagtctgtagagaatcgctagatgcagtaggtcttggtgaagtttcaactctcttcttgattaccttactcatgattaaacctaaataattgtactttgtaatataatgatatatattttcactttatctcatttgagaataaaaatgtttttgtttaaccactgcatgatgtacagatttcggaatcgcaaaccaccagtggttttattttatccttgtccaatgtgaattgaatgggagcggatgcgggtttcgtacgtagatagtacattcccgtttttagaccgagactccatccgtaaaaatgcatactcgttagtttggaataactcggatctgctatatggatattcatagattgactttgatcgatgaaggctcccctgtctgcagccatttttatgatcgtcttttgtggaatttcccaaatagttttataaactcgcttaatatcttctggaaggtttgtattctgaatggatccaccatctgccataatcctattcttgatctcatcattccataattttctctcggttaaaactctaaggagatgcggattaactacttgaaattctccagacaatactctccgagtgtaaatattactggtatacggttccaccgactcattatttcccaaaatttgagcagttgatgcagtcggcataggtgccaccaataaactatttctaagaccgtatgttctgattttatcttttagaggttcccaattccaaagatccgacggtacaacattccaaagatcatattgtagaataccgttactggcgtacgatcctacatatgtatcgtatggtccttccttctcagctagttcacaactcgcctctaatgcaccgtaataaatggtttcgaagatcttcttatttagatcttgtgcttccaggctatcaaatggataatttaagagaataaacgcgtccgctaatccttgaacaccaataccgataggtctatgtctcttattagagatttcagcttctggaataggataataattaatatctataattttattgagatttctgacaattactttgaccacatccttcagtttgagaaaatcaaatcgcccatctattacaaacatgttcaaggcaacagatgccagattacaaacggctacctcattagcatccgcatattgtattatctcagtgcaaagattactacacttgatagttcctaaattttgttgattactctttttgttacacgcatccttataaagaatgaatggagtaccagtttcaatctgagattctataatcgctttccagacgactcgagcctttattatagatttgtatctcctttctctttcgtatagtgtatacaatcgttcgaactcgtctccccaaacattgtccaatccaggacattcatccggacacatcaacgaccactctccgtcatccttcactcgtttcataaagagatcaggaatccaaagagctataaatagatctctggttctatgttcctcgtttcctgtattctttttaagatcgaggaacgccataatatcagaatgccacggttccaagtatatggccataactccaggccgtttgtttcctccctgatctatgtatctagcggtgttattataaactctcaacattggaataataccgtttgatataccattggtaccggagatatagcttccactggcacgaatattactaattgatagacctattccccctgccattttagagattaatgcgcatcgttttaacgtgtcatagataccctctatgctatcatcgatcatgttaagtagaaaacagctagacatttggtgacgactagttcccgcattaaataaggtaggagaagcgtgcgtaaaccatttttcagaaagtagattgtacgtctcaatagctgagtctatatcccattgatgaattcctactgcgacacgcattaacatgtgctgaggtctttcaacgatcttgttgtttattttcaacaagtaggatttttccaaagttttaaaaccaaaatagttgtatgaaaagtctcgttcgtaaataataaccgagttgagtttatccttatatttgttaactatatccatggtgatacttgaaataatcggagaatgtttcccatttttaggattaacatagttgaataaatcctccatcacttcactaaatagtttttttgtttccttgtgtagatttgatacggctattctggcggctagaatggcataatccggatgttgtgtagtacaagtggctgctatttcggctgccagagtgtccaattctaccgttgttactccattatatattccttgaataaccttcatagctattttaataggatctatatgatccgtgtttaagccataacataattttctaatacgagacgtgattttatcaaacatgacattttccttgtatccatttcgtttaatgacaaacatttttgttggtgtaataaaaaaattatttaacttttcattaatagggatttgacgtatgtagcgtacaaaatgatcgttcctggtatatagataaagagtcctatatatttgaaaatcgttacggctcgattaaactttaatgattgcatagtgaatatatcattaggatttaactccttgactatcatggcggcgccagaaattaccatcaaaagcattaatacagttatgccgatcgcagttaaaacggttatagcatccaccatttatatctaaaaattagatcaaagaatatgtgacaaagtcctagttgtatactgagaattgacgaaacaatgtttcttacatatttttttcttattagtaactgacttaatagtaggaactggaaagctagacttgattattctataagtatagatacccttccagataatgttctctttgataaaagttccagaaaatgtagaattttttaaaaagttatcttttgctattaccaagattgtgtttagacgcttattattaatatgagtgatgaaatccacaccgcctctagatatcgcctttatttccacattagatggtaaatccaatagtgaaactatctttttaggaatgtatggactcgcgtttagaggagtgaacgtcttgggcgtcggaaaggatgattcgtcaaacgaataaacaatttcacaaatggatgttaatgtattagtaggaaattttttgacgctagtggaattgaagattctaatggatgatgttctacctatttcatccgataacatgttaatttccgacaccaacggttttaatatttcgatgatatacggtagtctctctttcggacttatatagcttattccacaatacgagtcattatatactccaaaaaacaaaataactagtataaaatctgtatcgaatgggaaaaacgaaattatcgacataggtatagaatccggaacattgaacgtattaatacttaattctttttctgtggtaagtaccgataggttattgacattgtatggttttaaatattctataacttgagacttgatagatattagtgatgaattgaaaattatttttatcaccacgtgtgtttcaggatcatcgtcgacgcccgtcaaccaaccgaatggagtaaaataaatatcattaatatatgctctagatattagtatttttattaatcctttgattatcatcttctcgtaggcgaatgattccatgatcaagagtgatttgagaacatcctccggagtattaatgggcttagtaaacagtccatcgttgcaataataaaagttatccaagttaaaggatattatgcattcgtttaaagatatcacctcatctgacggagacaattttttggtaggttttagagactttgaagctacttgtttaacaaagttattcatcgtcgtctactattctatttaattttgtagttaatttatcacatatcacattaattgactttttggtccatttttccatacgtttatattcttttaatcctgcgttatccgtttccgttatatccagggatagatcttgcaagttaaatagaatgctcttaaataatgtcattttcttatccgctaaaaatttaaagaatgtataaacctttttcagagatttgaaactcttaggtggtgtcctagtacacaatatcataaacaaactaataaacattccacattcagattccaacagctgattaacttccacattaatacagcctattttcgctccaaatgtacattcgaaaaatctgaataaaacatcgatgtcacaatttgtattatccaatacagaatgtttgtgattcgtgttaaaaccatcggagaaggaatagaaataaaaattattatagtggtggaattcagttggaatattgcctccggagtcataaaaggatactaaacattgttttttatcataaattacacatttccaatgagacaaataacaaaatccaaacattacaaatctagaggtagaacttttaattttgtctttaagtatatacgataagatatgtttattcataaacgcgtcaaatttttcatgaatcgctaaggagtttaagaatctcatgtcaaattgtcctatataatccacttcggatccataagcaaactgagagactaagttcttaatacttcgattgctcatccaggctcctctctcaggctctattttcatcttgacgacctttggattttcaccagtatgtattcctttacgtgataaatcatcgattttcaaatccatttgtgagaagtctatcgccttagatactttttcccgtagtcgaggtttaaaaaaatacgctaacggtatactagtaggtaactcaaagacatcatatatagaatggtaacgcgtctttaactcgtcggttaactctttcttttgatcgagttcgtcgctactattgggtctgctcaggtgccccgactctactagttccaacatcataccgataggaatacaagacactttgccggcggttgtagatttatcatatttttccactacatatccgttacaatttgttaaaaatttagatacatctatattgctacataatccagctagtgaatatatatgacataataaattggtaaatcctagttctggtattttactaattactaaatctgtatatctttccatttatcatggaaaagaatttaccagatatcttcttttttccaaactgcgttaatgtattctcttacaaatattcacaagatgaattcagtaatatgagtaaaacggaacgtgatagtttctcattggccgtgtttccagttataaaacatagatggcataacgcacacgttgtaaaacataaaggaatatacaaagttagtacagaagcacgtggaaaaaaagtatctcctccatcactaggaaaacccgcacacataaacctaaccgcgaagcaatatatatacagtgaacacacaataagctttgaatgttatagttttctaaaatgtataacaaatacagaaatcaattcgttcgatgagtatatattaagaggactattagaagctggtaatagtttacagatattttccaattccgtaggtaaacgaacagatactataggtgtactagggaataagtatccatttagcaaaattccattggcctcattaactcctaaagcacaacgagagatattttcagcgtggatttctcatagacctgtagttttaactggaggaaccggagtgggtaagacgtcacaggtacccaagttattgctttggtttaattatttatttggtggattctctactctagataaaattactgactttcacgaaagaccagtcattctatctcttcctaggatagctttagttagattgcatagcaataccattttaaaatcattgggatttaaggtactagatggatctcctatttctttacggtacggatctataccggaagaattaataaacaaacaaccaaaaaaatatggaattgtattttctacccataagttatctctaacaaaactatttagttatggcactcttattatagacgaagttcatgagcatgatcaaataggagatattattatagcagtagcgagaaagcatcatacgaaaatagattctatgtttttaatgactgccacattagaggatgaccgagaacggctaaaagtatttttacctaatcccgcatttatacatattcctggagatacactgtttaaaattagcgaggtatttattcataataagataaatccatcttccagaatggcatacatagaagaagaaaagagaaatttagttactgctatacagatgtatactcctcctgatggatcatccggtatagtctttgtggcatccgttgcacagtgtcacgaatataaatcatatttagaaaaaagattaccgtatgatatgtatattattcatggtaaggtcttagatatagacgaaatattagaaaaagtgtattcatcacctaatgtatcgataattatttctactccttatttggaatccagcgttactatacgcaatgttacacacatttatgatatgggtagagtttttgtccccgctccttttggaggatcgcaacaatttatttctaaatctatgagagatcaacgaaaaggaagagtaggaagagttaatcctggtacatacgtctatttctatgatctgtcttatatgaagtctatacagcgaatagattcagaatttctacataattatatattgtacgctaataagtttaatctaacactccccgaagatttgtttataatccctacaaatttggatattctatggcgtacaaaggaatatatagactcgttcgatattagtacagaaacatggaataaattattatccaattattatatgaagatgatagagtatgctaaactttatgtactaagtcctattctcgctgaggagttggataactttgagaggacgggagaattaactagtattgtacgagaagccattttatctctaaatttacgaattaagattttaaattttaaacataaagatgatgatacgtatatacacttttgtaaaatattattcggtgtctataacggaacaaacgctactatatattatcatagacctctaacgggatatatgaatatgatttcagatactatatttgttcctgtagataataactaaaaatcaaactctaatgaccacatctttttttagagatgaaaaattttccacatctccttttgtagacacgactaaacattttgcagaaaaaagtttattagtgtttagataatcgtatacttcatcagtgtagatagtaaatgtgaacagataaaaggtattcttgctcaatagattggtaaattccatagaatatattaatcctttcttcttgagatcccacatcatttcaaccagagacgttttatccaatgatttacctcgtactataccacatacaaaactagattttgcagtgacgtcgtacctggtattcctaccaaacaaaattttacttttagttcttttagaaaattctaaggtagaatctctatttgccaatatgtcatctatggaattaccactagcaaaaaatgatagaaatatatattgatacatcgcagctggttttgatctactatactttaaaaacgaatcagattccataattgcctgtatatcatcagctgaaaaactatgttttacacgtattccttcggcatttctttttaatgatatatcttgtttagacaatgataaagttatcatgtccatgagagacgcgtctccgtatcgtataaatatttcattagatgttagacgcttcattaggggtatacttctataaggtttcttaatcagtccatcattggttgcgtcaagaactactatcggatgttgttgggtatctctagtgttacacatggccttactaaagtttgggtaaataactatgatatctctattaattatagatgcatatatttcattcgtcaaggatattagtatcgacttgctatcgtcattaatacgtgtaatgtaatcatataaatcatgcgatagccaaggaaaatttaaatagatgttcatcatataatcgtcgctataattcatattaatacgttgacattgactaatttgtaatatagcctcgccacgaagaaagctctcgtattcagtttcatcgataaaggataccgttaaatataactggttgccgatagtctcatagtctattaagtggtaagtttcgtacaaatacagaatccctaaaatattatctaatgttggattaatctttaccataactgtataaaatggagacggagtcataactattttaccgtttgtacttactggaatagatgaaggaataatctccggacatgctggtaaagacccaaatgtctgtttgaagaaatccaatgttccaggtcctaatctcttaacaaaaattacgatattcgatcccgatatcctttgcattctatttaccagcatatcacgaactatattaagattatctatcatgtctattctcccaccgttatataaatcgcctccgctaagaaacgttagtatatccatacaatggaatacttcatttctaaaatagtattcgttttctaattctttaatgtgaaatcgtatactagaaagggaaaaattatctttgagttttccgttagaaaagaaccacgaaactaatgttctgattgcgtccgattccgttgctgaattaatggatttacaccaaaaactcatataacttctagatgtagaagcattcgctaaaaaattagtagaatcaaaggatataagtagatgttccaacaagtgagcaattcccaagatttcatctatatcattctcgaatccgaaattagaaattcccaagtagatatcctttttcatccgatcgttgatgaaaatacgaactttattcggtaagacaatcatttactaaggagtaaaataggaagtaatgttcgtatgtcgttatcatcgtataaattaaaggtgtgttttttaccattaagtgacattataattttaccaatattggaattataatataggtgtatttgcgcactcgcgacggttgatgcatcggtaaatatagctgtatctaatgttctagtcggtatttcatcatttcgctgtctaataatagcgttttctctatctgtttccattacagctgcctgaagtttattggtcggataatatgtaaaataataagaaatacatacgaataacaaaaataaaataagatataataaagatgccatttagagatctaattttgtttaacttgtccaaattcctacttacagaagatgaggaatcgttggagatagtgtcttccttatgtagaggatttgaaatatcttataatgacttgataacttactttccagataggaaataccataaatatatttataaagtatttgaacatgtagatttatcggaggaattaagtatggaattccatgatacaactctgagagatttagtctatcttagattgtacaagtattccaagtgtatacggccgtgttataaattaggagataatctaaaaggcatagttgttataaaggacaggaatatttatattagggaagcaaatgatgacttgatagaatatctcctcaaggaatacactcctcagatttatacatattctaatgagcgcgtccccataactggttcaaaattaattctttgtggattttctcaagttacatttatggcgtatacaacgtcgcatataacaacaaataaaaaggtagatgttctcgtttccaaaaaatgtatagatgaactagtcgatccaataaattatcaaatacttcaaaatttatttgataaaggaagcggaacaataaacaaaatactcaggaagatattttattcggtaacaggtggccaaactccataggtagctttttctatttcggattttagaatttccaaattcaccagcgatttatcggttttggtgaaatccaaggatttattaatgtccacaaatgccatttgttttgtctgtggattgtatttgaaaatggaaacgatgtagttagatagatgcgctgcaaagtttcctattagggttccgcgctttacgtcacccagcatacttgaatcaccatcctttaaaaaaaatgataagatatcaacatggagtatatcatactcggattttaattcttctactgcatcactgacattttcacaaatactacaatacggtttaccgaaaataatcagtacgttcttcatttatgggtatcaaaaacttaaaatcgttactgctggaaaataaatcactgacgatattagatgataatttatacaaagtatacaatggaatatttgtggatacaatgagtatttatatagccgtcgccaattgtgtcagaaacttagaagagttaactacggtattcataaaatacgtaaacggatgggtaaaaaagggagggcatgtaaccctttttatcgatagaggaagtataaaaattaaacaagacgttagagacaagagacgtaaatattctaaattaaccaaggacagaaaaatgttagaattagaaaagtgtacatccgaaatacaaaatgttaccggatttatggaagaagaaataaaggcagaaatgcaattaaaaatcgataaactcacatttcaaatatatttatctgattctgataacataaaaatatcattgaatgagatactaacacatttcaacaataatgagaatgttacattattttattgtgatgaacgagacgcagaattcgttatgtgtctcgaggctaaaacacatttctctaccacaggagaatggccgttgataataagtaccgatcaggatactatgctatttgcatctgctgataatcatcctaagatgataaaaaacttaactcaactgtttaaatttgttccctcggcagaggataactatttagcaaaattaacggcgttagtgaatggatgtgatttctttcctggactctatggggcatctataacacccaccaacttaaacaaaatacaattgtttagtgattttacaatcgataatatagtcactagtttggcaattaaaaattattatagaaagactaactctaccgtagacgtgcgtaatattgttacgtttataaacgattacgctaatttagacgatgtctactcgtatattcctccttgtcaatgcactgttcaagaatttatattttccgcattagatgaaaaatggaatgaatttaaatcatcttatttagaaagcgtgccgttaccctgccaattaatgtacgcgttagaaccacgcaaggagattgatgtttcagaagttaaaactttatcatcttatatagatttcgaaaatactaaatcagatatcgatgttataaaatctatatcctcgatcttcggatattctaacgaaaactgtaacacgatagtattcggcatctataaggataatttactactgagtataaataattcattttactttaacgatagtctgttaataaccaatactaaaagtgataatataataaatataggttactagattaaaaatggtgttccaactcgtgtgctctacatgcggtaaagatatttctcacgaacgatataaattgattatacgaaaaaaatcattaaaggatgtactcgtcagtgtaaagaacgaatgttgtaggttaaaattatctacacaaatagaacctcaacgtaacttaacagtgcaacctctattggatataaactaatatggatccggttaattttatcaagacatatgcgcctagaggttctattatttttattaattataccatgtcattaacaagtcatttgaatccatcgatagaaaaacatgtgggtatttattatggtacgttattatcggaacacttggtagttgaatctacctatagaaaaggagttcgaatagtcccattggatagtttttttgaaggatatcttagtgcaaaagtatacatgttagagaatattcaagttatgaaaatagcagctgatacgtcattaactttattgggtattccgtatggatttggtcataatagaatgtattgttttaaattggtagctgactgttataaaaatgccggtattgatacatcgtctaaacgaatattgggcaaagatatttttctgagccaaaacttcacagacgataatagatggataaagatatatgattctaataatttaacattttggcaaattgattaccttaaagggtgagttaatatgcataactactcctccgttgttttttccctcgttctttttcttaacgttgtttgccatcactctcataatgtaaagatattctaaaatggtaaacttttgcatatcggacgcagaaattggtataaatgttgtaattgtattatttcccgtcaatggactagtcacagctccatcagttttatatcctttagagtatttctcactcgtgtctaacattctagagcattccatgatctgtttatcgttgatattggccggaaagatagattttttattttttattatattactattggcaattgtagatataacttctggtaaatatttttctaccttttcaatctcttctattttcaagccggctatatattctgctatattgttgctagtatcaataccttttctggctaagaagtcatatgtggtattcactatatcagttttaactggtagttccattagcctttccacttctgcagaataatcagaaattggttctttaccagaaaatccagctactataataggctcaccgatgatcattggcaaaatcctatattgtaccagattaatgagagcatatttcatttccaataattctgctagttcttgagacattgatttatttgatgaatctagttggttctctagatactctaccatttctgccgcatacaataacttgttagataaaatcagggttatcaaagtgtttagcgtggctagaatagtgggcttgcatgtattaaagaatgcggtagtatgagtaaaccgttttaacgaattatatagtctccagaaatctgtggcgttacatacatgagccgaatgacatcgaagattgtccaatatttttaatagctgctctttgtccattatttctatatttgactcgcaacaattgtagataccattaatcaccgattcctttttcgatgccggacaatagcacaattgtttagctttggactctatgtattcagaattaatagatatatctctcaatacagattgcactatacattttgaaactatgtcaaaaattgtagaacgacgctgttctgcagccatttaactttaaataatttacaaaaatttaaaatgagcatccgtataaaaatcgataaactgcgccaaattgtggcatatttttcagagttcagtgaagaagtgtctataaatgtagactcgacggatgagttaatgtatatttttgccgccttgggcggatctgtaaacatttgggcaattatacctctaagtgcatcagtgttttaccgaggagccgaaaatattgtgtttaatcttcctgtgtccaaggtaaaatcgtgtttgtgtagttttcacaatgatgccatcatagatatagaacctgatctggaaaataatctagtaaaactttctagttatcatgtagtaagtgtcgattgtaacaaggaactgatgcctattaggacagatactactatttgtctaagtatagatcaaaagaaatcttacgtgtttaattttcacaagtatgaagaaaaatgttgtggtagaaccgtcattcatctagaatggttgttgggctttatcaagtgtattagtcagcatcagcatctggctattatgtttaaagatgacaatattattatgaagactcctggtaatactgatgcgttttccagggaatattctatgactgaatgttctcaagaactacaaaagttttctttcaaaatagctatctcgtctctcaacaaactacgaggattcaaaaagagagtcaatgtttttgaaactagaatcgtaatggataatgacgataacattttaggaatgttgttttcggatagagttcaatcctttaagatcaacatctttatggcgtttttagattaatactttcaatgagataaatatgggtggcggagtaagtgttgagctccctaaacgggatccgcctccgggagtacccactgatgagatgttattaaacgtggataaaatgcatgacgtgatagctcccgctaagcttttagaatatgtgcatataggaccactagcaaaagataaagaggataaagtaaagaaaagatatccagagtttagattagtcaacacaggacccggtggtctttcggcattgttaagacaatcgtataatggaaccgcacccaattgctgtcgcacttttaatcgtactcattattggaagaaggatggaaagatatcagataagtatgaagagggtgcagtattagaatcgtgttggccagacgttcacgacactggaaaatgcgatgttgatttattcgactggtgtcagggggatacgttcgatagaaacatatgccatcagtggatcggttcagcctttaataggagtaatagaactgtagagggtcaacaatcgttaataaatctgtataataagatgcaaacattatgtagtaaagatgctagtgtaccaatatgcgaatcatttttgcattatttacgcgcacacaatacagaagatagcaaagagatgatcgattatattctaagacaacagtctgcggactttaaacagaaatatatgagatgtagttatcccactagagataagttagaagagtcattaaaatatgcggaacctcgagaatgttgggatccagagtgttcgaatgccaatgttaatttcttactaacacgtaattataataatttaggactttgcaatattgtacgatgtaataccagcgtgaacaacttacagatggataaaacttcctcattaagattgtcatgtggattaagcaatagtgatagattttctactgttcccgtcaatagagcaaaagtagttcaacataatattaaacactcgttcgacctaaaattgcatttgatcagtttattatctctcttggtaatatggatactaattgtagctatttaaatgggtgccgcggcaagcatacagacgacggtgaatacactcagcgaacgtatctcgtctaaattagaacaagaagcgaacgctagtgctcaaacaaaatgtgatatagaaatcggaaatttttatatccgacaaaaccatggatgtaacctcactgttaaaaatatgtgctctgcggacgcggatgctcagttggatgctgtgttatcagccgctacagaaacatatagtggattaacaccggaacaaaaagcatacgtgccagctatgtttactgctgcgttaaacattcagacgagtgtaaacactgttgttagagattttgaaaattatgtgaaacagacttgtaattctagcgcggtcgtcgataacaaattaaagatacaaaacgtaatcatagatgaatgttacggagccccaggatctccaacaaatttggaatttattaatacaggatctagcaaaggaaattgtgccattaaagcgttgatgcaattgacgactaaggccactactcaaatagcacctagacaagttgctggtacaggagttcagttttatatgattgttatcggtgttataatattggcagcgttgtttatgtactatgccaagcgtatgttgttcacatccaccaatgataaaatcaaacttattttagccaataaggaaaacgtccattggactacttacatggacacattctttagaacttctccgatggttattgctaccacggatatgcaaaactgaaaatatattgataatattttaatagattaacatggaagttatcgctgatcgtctagacgatatagtgaaacaaaatatagcggatgaaaaatttgtagattttgttatacacggtctagagcatcaatgtcctgctatacttcgaccattaattaggttgtttattgatatactattatttgttatagtaatttatatttttacggtacgtctagtaagtagaaattatcaaatgttgttggtggtgctagtcatcacattaactattttttattactttatactataatagtactagactgacttctaacaaacatctcacctgccataaataaatgcttgatattaaagtcttctatttctaacactattccatctgtggaaaataatactctgacattatcgctaattgacacatcggtgagtgatatgcctataaagtaataatcttctttgggcacatataccagtgtaccaggttctaacaacctatttactggtgctcctgtagcatactttttctttaccttgagaatatccatcgtttgcttggtcaatagcgatatgtgattttttatcaaccactcaaaaaagtaattggagtgttcatatcctctacgggctattgtctcatggccgtgtatgaaatttaagtaacacgactgtggtagatttgttctatagagccgattgccgcaaatagatagaactaccaatatgtctgtacaaatgttaaacattaattgattaacagaaaaaacaatgttcgttctgggaatagaaaccagatcaaaacaaaattcgttagaatatatgccacgtttatacatggaatataaaataactacagtttgaaaaataacagtatcatttaaacatttaacttgcggggttaatctcacaactttactgtttttgaactgttcaaaatatagcatcgatccgtgagaaatacgtttagccgcctttaatagaggaaatcccaccgcctttctggatctcaccaacgacgatagttctgaccagcaactcatttcttcatcatccacctgttttaacatataataggcaggagatagatatccgtcattgcaatattccttctcgtaggcacacaatctaatattgataaaatctccattctcttctctgcatttattatcttgtctcggtggctgattaggctgtggtcttggtttaggccttggtctatcgttgttgaatctattttggtcattaaatctttcatttcttcctggtatatttttatcacctcgtttggttggatttttgtctatattatcgtttgtaacatcggtacgggtattcatttatcacaaaaaaaacttctctaaatgagtctactgctagaaaacctcatcgaagaagataccatattttttgcaggaagtatatctgagtatgatgatttacaaatggttattgccggcgcaaaatccaaatttccaagatctatgctttctatttttaatatagtacctagaacgatgtcaaaatatgagttggagttgattcataacgaaaatatcacaggagcaatgtttaccacaatgtataatataagaaacaatttgggtctaggagatgataaactaactattgaagccattgaaaactatttcttggatcctaacaatgaagttatgcctcttattattaataatacggatatgactgccgtcattcctaaaaaaagtggtaggagaaagaataagaacatggttatcttccgtcaaggatcatcacctatcttgtgcattttcgaaactcgtaaaaagattaatatttataaagaaaatatggaatccgcgtcgactgagtatacacctatcggagacaacaaggctttgatatctaaatatgcgggaattaatgtcctgaatgtgtattctccttccacatccataagattgaatgccatttacggattcaccaataaaaataaactagagaaacttagtactaataaggaactagaatcgtatagttctagccctcttcaagaacccattaggttaaatgattttctgggactattggaatgtgttaaaaagaatattcctctaacagatattccgacaaaggattgattactataaatggagaatgttcctaatgtatactttaatcctgtgtttatagagcccacgtttaaacattctttattaagtgtttataaacacagattaatagttttatttgaagtattcgttgtattcattctaatatatgtattttttagatctgaattaaatatgttcttcatgcctaaacgaaaaatacccgatcctattgatagattacgacgtgctaatctagcgtgtgaagacgataaattaatgatctatggattaccatggatgacaactcaaacatctgcgttatcaataaatagtaaaccgatagtgtataaagattgtgcaaagcttttgcgatcaataaatggatcacaaccagtatctcttaacgatgttcttcgcagatgatgattcattttttaagtatttggctagtcaagatgatgaatcttcattatctgatatattgcaaatcactcaatatctagactttctgttattattattgatccaatcaaaaaataaattagaagctgtgggtcattgttatgaatctctttcagaggaatacagacaattgacaaaattcacagactttcaagattttaaaaaactgtttaacaaggtccctattgttacagatggaagggtcaaacttaataaaggatatttgttcgactttgtgattagtttgatgcgattcaaaaaagaatcctctctagctaccaccgcaatagatcctgttagatacatagatcctcgtcgtgatatcgcattttctaacgtgatggatatattaaagtcgaataaagtgaacaataattaattctttattgtcatcatgaacggcggacatattcagttgataatcggccccatgttttcaggtaaaagtacagaattaattagacgagttagacgttatcaaatagctcaatataaatgcgtgactataaaatattctaacgataatagatacggaacgggactatggacgcatgataagaataattttgaagcattggaagcaactaaactatgtgatgtcttggaatcaattacagatttctccgtgataggtatcgatgaaggacagttctttccagacattgtttaattctgtgagcgtatggcaaacgaaggaaaaatagttatagtagccgcactcgatgggacatttcaacgtaaaccgtttaataatattttgaatcttattccattatctgaaatggtggtaaaactaactgctgtgtgtatgaaatgctttaaggaggcttccttttctaaacgattgggtgaggaaaccgagatagagataataggaggtaatgatatgtatcaatcggtgtgtagaaagtgttacgtcggctcataatattatattttttatctaaaaaactaaaaataaacattgattaaattttaatataatacttaaaaatggatgttgtgtcgttagataaaccgtttatgtattttgaggaaattgataatgagttagattacgaaccagaaagtgcaaatgaggtcgcaaaaaaactgccgtatcaaggacagttaaaactattactaggagaattattttttcttagtaagttacagcgacacggtatattagatggtgccaccgtagtgtatataggatcggctcctggtacacatatacgttatttgagagatcatttctataatttaggagtgatcatcaaatggatgctaattgacggccgccatcatgatcctattttaaatggattgcgtgatgtaactctagtgactcggttcgttgatgaggaatatctacgatccatcaaaaaacaactgcatccttctaagattattttaatttctgatgtgagatccaaacgaggaggaaatgaacctagtacggcggatttactaagtaattacgctctacaaaatgtcatgattagtattttaaaccccgtggcgtctagtcttaaatggagatgcccgtttccagatcaatggatcaaggacttttatatcccacacggtaataaaatgttacaaccttttgctccttcatattcagctgaaatgagattattaagtatttataccggtgagaacatgagactgactcgagttaccaaattagacgctgtaaattatgaaaaaaagatgtactaccttaataagatcgtccgtaacaaagtagttgttaactttgattatcctaatcaggaatatgactattttcacatgtactttatgctgaggaccgtgtactgcaataaaacatttcctactactaaagcaaaggtactatttctacaacaatctatatttcgtttcttaaatattccaacaacatcaactgaaaaagttagtcatgaaccaatacaacgtaaaatatctagcaaaaattctatgtctaaaaacagaaatagcaagagatccgtacgcggtaataaatagaaacgtactactgagatatactaccgatatagagtataatgatttagttactttaataaccgttagacataaaattgattctatgaaaactgtgtttcaggtatttaacgaatcatccataaattatactccggttgatgatgattatggagaaccaatcattataacatcgtatcttcaaaaaggtcataacaagtttcctgtaaattttctatacatagatgtggtaatatctgacttatttcctagctttgttagactagatactacagaaactaatatagttaatagtgtactacaaacaggcgatggtaaaaagactcttcgtcttcccaaaatgttagagacggaaatagttgtcaagattctctatcgccctaatataccattaaaaattgttagatttttccgcaataacatggtaactggagtagagatagccgatagatctgttatttcagtcgctgattaatcaattagtagagatgagataagaacattataataatcaataatatatcttatatcttatatcttatatcttatatcttgtttagaaaaatgctaatattaaaatagctaacgctagtaatccaatcggaagccatttgatatctataatagggtatctaatttcctgatttaaatagcggacagctatattctcggtagctactcgtttggaatcacaaacattatttacatctaatttactatctgtaatggaaacgtttcccaatgaaatggtacaatccgatacattgcattttgttatatttttttttaaagaggctggtaacaacgcatcgcttcgtttacatggctcgtaccaacaataatagggtaatcttgtatctattcctatccgtactatgcttttatcaggataaatacatttacatcgtatatcgtctttgttagcatcacagaatgcataaatttgttcgtccgtcatgataaaaatttaaagtgtaaatataactattatttttatagttgtaataaaaagggaaatttaattgtatactttcggttctttaaaagaaactgacttgataaaaatggctgtaatctctaaggttacgtatagtctatatgatcaaaaagagattaatgctacagatattatcattagtcatgttaaaaatgacgacgatatcggtaccgttaaagatggtagactaggtgctatggatggggcattatgtaagacttgtgggaaaacggaattggaatgtttcggtcactggggtaaagtaagtatttataaaactcatatagttaagcctgaatttatttcagaaattattcgtttactgaatcatatatgtattcactgcggattattgcgttcacgagaaccgtattccgacgatattaacctaaaagagttatcgggacacgctcttaggagattaaaggataaaatattatccaagaaaaagtcatgttggaacagtgaatgtatgcaaccgtatcaaaaaattactttttcaaagaaaaaggtttgtttcgtcaacaagttggatgatattaacgttcctaattctctcatctatcaaaagttaatttctattcatgaaaagttttggccattattagaaattcatcaatatccagctaacttattttatacagactactttcccatccctccgttgattattagaccggctattagtttttggatagatagtatacccaaagagaccaatgaattaacttacttattaggtatgatcgttaagaattgtaacttgaatgctgatgaacaggttatccagaaggcggtaatagaatacgatgatattaaaattatttctaataacactaccagtatcaatttatcatatattacatccggcaaaaataatatgattagaagttatatcgtcgcccgacgaaaagatcagaccgctagatctgtaattggtcccagtacatctatcaccgttaatgaggtaggaatgcccgcatatattagaaatacacttacagaaaagatatttgttaatgcctttacagtggataaagttaaacaactattagcgtcaaaccaagttaaattttactttaataaacgattaaaccaattaacaagaatacgccaaggaaagtttattaaaaataaaatacatttattgcctggtgattgggtagaagtagctgttcaagaatatacaagtattatttttggaagacagccgtctctacatagatacaacgtcatcgcttcatctatcagagctaccgaaggagatactatcaaaatatctcccggaattgccaactctcaaaatgctgatttcgacggggatgaggaatggatgatattagaacaaaatcctaaagctgtaattgaacaaagtattcttatgtatccgacgacgttactcaaacacgatattcatggagcccccgtttatggatctattcaagatgaaatcgtagcagcgtattcattgtttaggatacaagatctttgtttagatgaagtattgaacatcttggggaaatatggaagagagttcgatcctaaaggtaaatgtaaattcagcggtaaagatatctatacttacttgataggtgaaaagattaattatccgggtctcttaaaggatggtgaaattattgcaaacgacgtagatagtaattttgttgtggctatgaggcatctgtcattggctggactcttatccgatcataagtcgaacgtggaaggtatcaactttattatcaagtcatcttatgtttttaagagatatctatctatttacggttttggggtgacattcaaagatctgagaccaaattcgacgttcactaataaattggaggccatcaacgtagaaaaaatagaacttatcaaagaagcatacgccaaatatctcaacgatgtaagagacgggaaaatagttccattatctaaagctttagaggcggactatgtggaatccatgttatccaacttgacaaatcttaatatccgagagatagaagaacatatgagacaaacgctgatagatgatccagataataacctcctgaaaatggccaaagcgggttataaagtaaatcccacagaactaatgtatattctaggtacgtatggacaacaaaggattgatggtgaaccagcagagactcgagtattgggtagagttttaccttactatcttccagactctaaggatccagaaggaagaggttatattcttaattctttaacaaaaggattaacgggttctcaatattacttttcgatgctggttgcaagatctcaatctactgatatcgtctgtgaaacatcacgtaccggaacactggctagaaaaatcattaaaaagatggaggatatggtggtcgacggatacggacaagtagttataggtaatacgctcatcaagtacgccgccaattataccaaaattctaggctcagtatgtaaacctgtagatcttatctatccagatgagtccatgacttggtatttggaaattagtgctctgtggaataaaataaaacagggattcgtttactctcagaaacagaaacttgcaaagaagacattggcgccgtttaatttcctagtattcgtcaaacccaccactgaggataatgctattaaggttaaggatctgtacgatatgattcataacgtcattgatgatgtgagagagaaatacttctttacggtatctaatatagattttatggagtatatattcttgacgcatcttaatccttctagaattagaattacaaaagaaacggctatcactatctttgaaaagttctatgaaaaactcaattatactctaggtggtggaactcctattggaattatttctgcacaggtattgtctgagaagtttacacaacaagccctgtccagttttcacactactgaaaaaagtggtgccgtcaaacaaaaacttggtttcaacgagtttaataacttgactaatttgagtaagaataagaccgaaattatcactctggtatccgatgatatctctaaacttcaatctgttaagattaatttcgaatttgtatgtttgggagaattaaatccagacatcactcttcgaaaagaaacagataggtatgtagtagatataatagtcaatagattatacatcaagagagcagaaataaccgaattagtcgtcgaatatatgattgaacgatttatctcctttagcgtcattgtaaaggaatggggtatggaaacattcattgaggatgaggataatattagatttactgtctacctaaatttcgttgaaccggaagaattgaatcttagtaagtttatgatggttcttccgggtgccgccaacaagggaaagattagtaaattcaagattcctatctctgactatacgggttatgacgacttcaatcaaacaaaaaagctcaataagatgactgtagaactcatgaatctaaaagaattgggttctttcgatttggaaaacgtcaacgtgtatcctggagtatggaatacatacgatatcttcggtatcgaggccgctcgtgaatacttgtgcgaagccatgttaaacacctatggagaagggttcgattatctgtatcagccttgtgatcttctcgctagtttactatgtgctagttacgaaccagaatcagtgaataaattcaagttcggcgcagctagtactcttaagagagctacgttcggagacaataaagcattgttaaacgcggctcttcataaaaagtcagaacctattaacgataatagtagctgccacttttttagcaaggtccctaatataggaactggatattacaaatactttatcgacttgggtcttctcatgagaatggaaaggaaactatctgataagatatcttctcaaaagatcaaggaaatggaagaaacagaagacttttaattcttatcaataacatatttttctatgatctgtcttttaaacgatggattttccacaaatgcgcctctcaagtccctcatagaatgatacacgtataaaaaatatagcataggcaatgactccttatttttagacattagatatgccaaaatcatagccccgcttctatttactcccgcagcacaatgaaccaacacgggctcgtttcgttgatcacatttagataaaaaggcggttacgtcgtcaaaatatttactaatatcggtagttgtatcatctaccaacggtatatgaataatattaatattagagttaggtaatgtatatttatccatcgtcaaatttaaaacatatttgaacttaacttcagatgatggtgcatccatagcatttttataatttcccaaatacacattattggttacccttgtcattatagtgggagatttggctttgtgcatatctccagttgaacgtagtagtaagtatttatacaaacttttcttatccatttataacgtacaaatggataaaactactttatcggtaaacgcgtgtaatttagaatacgttagagaaaaggctatagtaggcgtacaagcagccaaaacatcaacacttatattctttgttattatattggcaattagtgcgctattactctggtttcagacgtctgataatccagtctttaatgaattaacgagatatatgcgaattaaaaatacggttaacgattggaaatcattaacggatagcaaaacaaaattagaaagtgatagaggtagacttctagccgctggtaaggatgatatattcgacttcaaatgtgtggatttcggcgcctattttatagctatgcgattggataagaaaacatatctgccgcaagctattaggcgaggtactggagacgcgtggatggttaaaaaggcggcaaaggtcgatccatctgctcaacaattttgtcagtatttgataaaacacaagtctaataatgttattacttgtggtaatgagatgttaaatgaattaggttatagcggttattttatgtcaccgcattggtgttccgattttagtaatatggaatagtgttagataaatgcggtaacgaatgttcctgtaaggaaccataacagcttagatttaacgttaaagatgagcataaacataataaacaaaattacaatcaaacttataacattaatatcaaacaatccaaaaaatgaaatcagtggagtagtaaacgcgtacataactcctggataacgtttagcagctgccgttcctattctagaccaaaaatttggtttcatgttttcgaaacggtattctgcaacaagtcggggatcgtgttctacatatttggcggcattatccagtatctgcctattgatcttcatttcgttttcgattctggctatttcaaaataaaatcccgatgatagacctccagactttataatttcatctacgatgttcagcgccgtagtaactctaataatataggctgataagctaacatcataccctcctgtatatgtgaatatggcatgatttttgtccattacaagctcggttttaactttattgcctgtaataatttctctcatctgtaggatatctatttttttgtcatgcattgccttcaagacgggacgaagaaacgtaatatcctcaataacgttatcgttttctacaataactacatattctacctttttattttctaactcggtaaaaaaattagaatcccatagggctaaatgtctagcgatatttcttttcgtttcctctgtacacatagtgttacaaaaccctgaaaagaagtgagtatacttgtcatcatttctaatgtttcctccagtccactgtataaacgcataatccttgtaatgatctggatcatccttgactaccacaacatttcttttttctggcataacttcgttgtcctttacatcatcgaacttctgatcattaatatgctcatgaacattaggaaatgtttctgatggaggtctatcaataactggcacaacaataacaggagttttcaccgccgccatttagttattgaaattaatcatatacaactctttaatacgagttatattttcgtctatccattgtttcacatttacatatttcgacaaaaagatataaaatgcgtattccaatgcttctctgtttaatgaattactaaaatatacaaacacgtcactgtctggcaataaatgatatcttagaatattgtaacaatttattttgtattgcacatgttcgtgatctatgagttcttcttcgaatggcataggatctccgaatctgaaaacgtataaataggagttagaataataatatttgagagtattggtaatatataaactctttagcggtataattagtttttttctctcaatttctatttttagatgtgatggaaaaatgactaattttgtagcattagtatcatgaactctaatcaaaatcttaatatcttcgtcacacgttagctctttgaagtttttaagagatgcatcagttggttctacagatggagtaggtgcaacaattttttgttctacacatgtatgtactggagccattgttttaactataatggtgcttgtatcgaaaaactttaatgcagatagcggaagctcttcgccgcgactttctacgtcgtaattgggttctaacgccgatctctgaatggatactagttttctaagttctaatgtgattctctgaaaatgtaaatccaattcctccggcattatagatgtgtatacatcggtaaataaaactatagtatccaacgatcccttctcgcaaattctagtcttaaccaaaaaatcgtatataaccacggagatggcgtatttaagagtggattcttctaccgttttgttcttggatgtcatataggaaactataaagtccgcactactgttaagaatgattactaacgcaactatatagttcaaattaagcattttggaaacataaaataactctgtagacgatacttgactttcgaataagtttgcagacaaacgaagaaagaacagacctctcttaatttcagaagaaaactttttttcgtattcctgacgtctagagtttatatcaataagaaagttaagaattagtcggttaatgttgtatttcattacccaagtttgagatttcataatattatcaaaagacatgataatattaaagataaagcgctgactatgaacgaaatagctatatggttcgctcaagaatatagtcttgttaaacgtggaaacgataactgtatttttaatcacgtcagcggcatctaaattaaatataggtatatttattccacacactctacaatatgccacaccatcttcataataaataaattcgttagcaaaattattaattttagtgaaatagttagcgtcaactttcatagcttccttcaatctaatttgatgctcacacggtgcgaattccactctaacatcccttttccatgcctcaggttcatcgatctctataatatctagttttttgcgtttcacaaacacaggctcgtctctcgcgatgagatctgtatagtaactatgtaaatgataactagatagaaagatgtagctatatagatgacgatcctttaagagaggtataataactttaccccaatcagatagactgttgttatggtcttcggaaaaagaatttttataaatttttccagtattttccaaatatacgtacttaacatctaaaaaatccttaatgataataggaatggataatccgtctattttataaagaaatacatatcgcacattatacttttttttggaaatgggaataccgatgtgtctacataaatatgcaaagtctaaatattttttagagaatcttagttggtccaaattcttttccaagtacggtaatagatttttcatattgaacggtatcttcttaatctctggttctagttccgcattaaatgatgaaactaagtcactatttttataactaacgattacatcacctctaacatcatcatttaccagaatactgatcttcttttgtcgtaaatacatgtctaatgtgttaaaaaaaagatcatacaagttatacgtcatttcatctgtggtattcttgtcattgaaggataaactcgtactaatctcttctttaacagcctgttcaaatttatatcctatatacgaaaaaatagcaaccagtgtttgatcatccgcgtcaatattctgttctatcgtagtgtataacaatcgtatatcttcttctgtgatagtcgatacgttataaaggttgataacgaaaatatttttatttcgtgaaataaagtcatcgtaggattttggacttatattcgcgtctagtagatatgcttttatttttggaatgatctcaattagaatagtctctttagagtccatttaaagttacaaacaactaggaaattggtttatgatgtataatttttttagtttttatagattctttattctatacttaaaaaatgaaaataaatacaaaggttcttgagggttgtgttaaattgaaagcgagaaataatcataaattatttcattatcgcgatatccgttaagtttgtatcgtaatggcgtggtcaattacgaataaagcggatactagtagcttcacaaagatggctgaaatcagagctcatctaaaaaatagcgctgaaaataaagataaaaacgaggatattttcccggaagatgtaataattccatctactaagcccaaaaccaaacgagccactactcctcgtaaaccagcggctactaaaagatcaaccaaaaaggaggaagtggaagaagaagtagttatagaggaatatcatcaaacaactgaaaaaaattctccatctcctggagtcagcgacattgtagaaagcgtggccgctgtagagctcgatgatagcgacggggatgatgaacctatggtacaagttgaagctggtaaagtaaatcatagtgctagaagcgatctctctgacctaaaggtggctaccgacaatatcgttaaagatcttaagaaaattattactagaatctctgcagtatcgacggttctagaggatgttcaagcagctggtatctctagacaatttacttctatgactaaagctattacaacactatctgatctagtcaccgagggaaaatctaaagttgttcgtaaaaaagttaaaacttgtaagaagtaaatgcgtgcacttttttataaagatggtaaactctttaccgataataattttttaaatcctgtatcagacgataatccagcgtatgaggttttgcaacatgttaaaattcctactcatttaacagatgtagtagtatatgaacaaacgtgggaggaggcgttaactagattaatttttgtgggaagcgattcaaaaggacgtagacaatacttttacggaaaaatgcatgtacagaatcgcaacgctaaaagagatcgtatttttgttagagtatataacgttatgaaacgaattaattgttttataaacaaaaatataaagaaatcgtccacagattccaattatcagttggcggtttttatgttaatggaaactatgttttttattagatttggtaaaatgaaatatcttaaggagaatgaaacagtagggttattaacactaaaaaataaacacatagaaataagtcccgatgaaatagttatcaagtttgtaggaaaggacaaagtttcacatgaatttgttgttcataagtctaatagactatataaaccgctattgaaactgacggatgattctagtcccgaagaatttctgttcaacaaactaagtgaacgaaaggtatatgaatgtatcaaacagtttggtattagaatcaaggatctccgaacgtatggagtcaattatacgtttttatataatttttggacaaatgtaaagtccatatctcctcttccatcaccaaaaaagttaatagcattaactatcaaacaaactgctgaagtggtaggtcatactccatcaatttcaaaaagagcttatatggcaacgactattttagaaatggtaaaggataaaaattttttagatgtagtatctaaaactacgttcgatgaattcctatctatagtcgtagatcacgttaaatcatctacggatggatgatatagatctttacacaaataattacaagaccgataaatggaaatggataagcgtatgaaatctctcgcaatgacagctttcttcggagagctaagcacattagatattatggcattgataatgtctatatttaaacgccatccaaacaataccattttttcagtggataaggatggtcagtttatgattgatttcgaatacgataattataaggcttctcaatatttggatctgaccctcactccgatatctggagatgaatgcaagactcacgcatcgagtatagccgaacaattggcgtgtgtggatattattaaagaggatattagcgaatatatcaaaactactccccgtcttaaacgatttataaaaaaataccgcaatagatcagatactcgcatcagtcgagatacagaaaagcttaaaatagctctagctaaaggcatagattacgaatatataaaagacgcttgttaataagtaaatgaaaaaaaactagtcgtttataataaaacacgatatggatgccaacgtagtatcatcttctactattgcgacgtatatagacgctttagcgaagaatgcttcagaattagaacagaggtctaccgcatacgaaataaataatgaattggaactagtatttattaagccgccattgattactttgacaaatgtagtgaatatctctacgattcaggaatcgtttattcgatttaccgttactaataaggaaggtgttaaaattagaactaagattccattatctaaggtacatggtctagatgtaaaaaatgtacagttagtagatgctatagataacatagtttgggaaaagaaatcattagtgacggaaaatcgtcttcacaaagaatgcttgttgagactatcgacagaggaacgtcatatatttttggattacaagaaatatggatcctctatccgactagaattagtcaatcttattcaagcaaaaacaaaaaactttacgatagactttaagctaaaatattttctaggatccggtgcccaatctaaaagttctttgttgcacgctattaatcatccaaagtcaaggcctaatacatctctggaaatagaattcacacctagagacaatgaaacagttccatatgatgaactaataaaggaattgacgactctctcgcgtcatatatttatggcttctccagagaatgtaattctttctccgcctattaacgcgcctataaaaacctttatgttgcctaaacaagatatagtaggtttggatctggaaaatctatatgccgtaactaagactgacggcattcctataactatcagagttacatcaaacgggttgtattgttattttacacatcttggttatattattagatatcctgttaagagaataatagattccgaagtagtagtctttggtgaggcagttaaggataagaactggaccgtatatctcattaagctaatagagcctgtgaatgcaatcaatgatagactagaagaaagtaagtatgttgaatctaaactagtggatatttgtgatcggatagtattcaagtcaaagaaatacgaaggtccgtttactacaactagtgaagtcgtcgatatgttatctacatatttaccaaagcaaccagaaggtgttattctgttctattcaaagggacctaaatctaacattgattttaaaattaaaaaggaaaatactatagaccaaactgcaaatgtagtatttaggtacatgtccagtgaaccaattatctttggagaatcgtctatctttgtagagtataagaaatttagcaacgataaaggctttcctaaagaatatggttctggtaagattgtgttatataacggcgttaattatctaaataatatctattgtttggaatatattaatacacataatgaagtgggtattaagtccgtggttgtacctattaagtttatagcagaattcttagttaatggagaaatacttaaacctagaattgataaaaccatgaaatatattaactcagaagattattatggaaatcaacataatatcatagtcgaacatttaagagatcaaagcatcaaaataggagatatctttaacgaggataaactatcggatgtgggacatcaatacgccaataatgataaatttagattaaatccagaagttagttattttacgaataaacgaactagaggaccgttgggaattttatcaaactacgtcaagactcttcttatttctatgtattgttccaaaacatttttagacgattccaacaaacgaaaggtattggcgattgattttggaaacggtgctgacctggaaaaatacttttatggagagattgcgttattggtagcgacggatccggatgctgatgctatagctagaggaaatgaaagatacaacaaattaaactctggaattaaaaccaagtactacaaatttgactacattcaggaaactattcgatccgatacatttgtctctagtgtcagagaagtattctattttggaaagtttaatatcatcgactggcagtttgctatccattattcttttcatccgagacattatgctaccgtcatgaataacttatccgaactaactgcttctggaggcaaggtattaatcactaccatggacggagacaaattatcaaaattaacagataaaaagacttttataattcataagaatttacctagtagcgaaaactatatgtctgtagaaaaaatagctgatgatagaatagtggtatataatccatcaacaatgtctactccaatgactgaatacattatcaaaaagaacgatatagtcagagtgtttaacgaatacggatttgttcttgtagataacgttgatttcgctacaattatagaacgaagtaaaaagtttattaatggcgcatctacaatggaagatagaccgtctacaaaaaactttttcgaactaaatagaggagccattaaatgtgaaggtttagatgtcgaagacttacttagttactatgttgtttatgtcttttctaagcggtaaataataatatggtatgggttctgatatccccgttctaaatgcattaaataattccaatagagcgatttttgttcctataggaccttccaactgtggatactctgtattgttaatagatatattaatacttttgtcgggtaacagaggttctacgtcttctaaaaataaaagttttataacatctggcctgttcataaataaaaacttggcgattctatatatactcttattatcaaatctagccattgtcttatagatgtgagctactgtaggtgtaccatttgattttctttctaatactatatatttctctcgaagaagttcttgcacatcatctgggaataaaatactactgttgagtaaatcagttattttttttatatcgatattgatggacatttttatagttaaggataataagtatcccaaagtcgataacgacgataacgaagtatttatacttttaggaaatcacaatgactttatcagattaaaattaacaaaattaaaggagcatgtatttttttctgaatatattgtgactccagatacatatggatctttatgcgtcgaattaaatgggtctagttttcagcacggtggtagatatatagaggtggaggaatttatagatgctggaagacaagttagatggtgttctacatccaatcatatatctaaagatatacccgaagatatgcacactgataaatttgtcatttatgatatatacacttttgacgctttcaagaataaacgattggtattcgtacaggtacctccgtcgttaggagatgatagtcatttgactaatccgttattgtctccgtattatcgtaattcagtagccagacaaatggtcaataatatgatttttaatcaagattcatttttaaaatatttattagaacatctgattagaagccactatagagtttctaaacatataacaatagttagatacaaggataccgaagaattaaatctaacgagaatatgttataatagagataagtttaaggcgtttgtattcgcttggtttaacggcgtttcggaaaatgaaaaggtactagatacgtataaaaaggtatctaatttgatataatgaattcagtgactgtatcacacgcgccatatactattacttatcacgatgattgggaaccagtaatgagtcaattggtagagttttataacgaagtagccagttggctgctacgagacgagacgtcgcctattcctgataagttctttatacagttgaaacaaccgcttagaaataaacgagtatgtgtgtgcggtatagatccgtatccgaaagatggaactggtgtaccgttcgaatcaccaaattttacaaaaaaatcaattaaggagatagcttcatctatatctagattaaccggagtaattgattataaaggttataaccttaatataatagacggggttataccctggaattattacttaagttgtaaattaggagaaacaaaaagtcacgcgatctactgggataagatttccaagttactgctgcagcatataactaaacacgttagtgttctttattgtttgggtaaaacagatttctcgaatatacgggcaaagttagaatccccggtaactaccatagtcggatatcatccagcggctagagaccgccaattcgagaaagatagatcatttgaaattatcaacgttttactggaattagacaacaaggcacctataaattgggctcaagggtttatttattaatgctttagtgaaattttaacttgtgttctaaatggatgcggctattagaggtaatgatgttatctttgttcttaagactataggtgtcccgtcagcgtgcagacaaaatgaagatccaagatttgtagaagcatttaaatgcgacgagttagaaagatatattgagaataatccagaatgtacactattcgaaagtcttagggatgaggaagcatactctatagtcagaattttcatggatgtagatttagacgcgtgtctagacgaaatagattatttaacggctattcaagattttattatcgaggtgtcaaactgtgtagctagattcgcgtttacagaatgcggtgccattcatgaaaatgtaataaaatccatgagatctaatttttcattgactaagtctacaaatagagataaaacaagttttcatattatctttttagacacgtataccactatggatacattgatagctatgaaacgaacactattagaattaagtagatcatctgaaaatccactaaccagatcgatagacactgccgtatataggagaaaaacaactcttcgggttgtaggtactaggaaaaatccaaattgcgacactattcatgtaatgcaaccaccgcatgataatatagaagattacctattcacttacgtggatatgaacaacaatagttattacttttctctacaacaacgattggaggatttagttcctgataagttatgggaaccagggtttatttcattcgaagacgctataaaaagagtttcaaaaatattcattaattctataataaactttaatgatctcgatgaaaataattttacaacggtaccactggtcatagattacgtaacaccttgtgcattatgtaaaaaacgatcgcataaacatccgcatcaactatcgttggaaaatggtgctattagaatttacaaaactggtaatccacatagttgtaaagttaaaattgttccgttggatggtaataaactgtttaatattgcacaaagaattttagacactaactctgttttattaaccgaacgaggagaccatatagtttggattaataattcatggaaatttaacagcgaagaacccttgataacaaaactaattttgtcaataagacatcaactacctaaggaatattcaagcgaattactctgtccgaggaaacgaaagactgtagaagctaacatacgagacatgttagtagattcagtggagaccgatacctatccggataaacttccgtttaaaaatggtgtattggacctggtagacggaatgttttactctggagatgatgctaaaaaatatacgtgtactgtatcaaccggatttaaatttgacgatacaaagttcgtcgaagacagtccagaaatggaagagttaatgaatatcattaacgatatccaaccattaacggatgaaaataagaaaaatagagagctatatgaaaaaacattatctagttgtttatgcggtgctaccaaaggatgtttaacattcttttttggagaaactgcaactggaaagtcgacaaccaaacgtttgttaaagtctgctatcggtgacctgtttgttgagacgggtcaaacaattttaacagatgtattggataaaggacctaatccatttatcgctaacatgcatttgaaaagatctgtattctgtagcgaactacctgattttgcatgtagtgggtcaaagaaaatcagatctgataatattaaaaagttgacagaaccttgtgtcattggaagaccgtgtttctccaataaaattaataatagaaaccatgcgacaatcattatcgatactaattacaaacctgtttttgataggatagataacgcattaatgagaagaattgccgtcgtgcgattcagaacacacttttctcaaccttctggtagagaggctgctgaaaataatgacgcgtacgataaagtcaaactattagacgaggggttagatggtaaaatacaaaataatagatatagattcgcatttctatacttgttggtgaaatggtacagaaaatatcatgttcctattatgaaactatatcctacacccgaagagattcctgactttgcattctatctcaaaataggtactctgttagtatctagctctgtaaagcatattccattaatgacggacctctccaaaaagggatatatattgtacgataatgtggttactcttccgttgactactttccaacagaaaatatccaagtattttaattctagactatttggacacgatatagagagcttcatcaatagacataagaaatttgccaatgttagtgatgaatatctgcaatatatattcatagaggatatttcatctccgtaaatatatgctcatatatttatagaagatatcacatatctaaatgaataccggaatcatagatttatttgataatcatgttgatagtataccaactatattacctcatcagttagctactctagattatctagttagaactatcatagatgagaacagaagcgtgttattgttccatattatgggatcaggtaaaacaataatcgctttgttgttcgccttggtagcttccagatttaaaaaggtttacattctagtgccgaacatcaacatcttaaaaattttcaattataatatgggtgtagctatgaacttgtttaatgacgaattcatagctgagaatatctttattcattccacaacaagtttttattctcttaattataacgataacgtcattaattataacggattatctcgctacaataactctatttttatcgttgatgaggcacataatatctttgggaataatactggagaacttatgaccgtgataaaaaataaaaacaagattccttttttactattgtctggatctcccattactaacacacctaatactctgggtcatattatagatttaatgtccgaagagacgatagattttggtgaaattattagtcgtggtaagaaagtaattcagacacttcttaacgaacgcggtgtgaatgtacttaaggatttgcttaaaggaagaatatcatattacgaaatgcctgataaagatctaccaacgataagatatcacggacgtaagtttctagatactagagtagtatattgtcacatgtctaaacttcaagagagagattatatgattactagacgacagctatgttatcatgaaatgtttgataaaaatatgtataacgtgtcaatggcagtattgggacaacttaatctgatgaataatttagatactttatttcaggaacaggataaggaattgtacccaaatctgaaaataaataatggcgtgttatacggagaagaattggtaacgttaaacattagttccaaatttaaatactttattaatcggatacagacactcaacggaaaacattttatatacttttctaattctacatatggcggattggtaattaaatatatcatgctcagtaatggatattctgaatataatggttctcagggaactaatccacatatgataaacggcaaaccaaaaacatttgctatcgttactagtaaaatgaaatcgtctttagaggatctattagatgtgtataattctcctgaaaacgatgatggtagtcaattgatgtttttgttttcatcaaacattatgtccgaatcctatactctaaaagaggtaaggcatatttggtttatgactatcccagatactttttctcaatacaaccaaattcttggacgatctattagaaaattctcttacgccgatatttctgaaccagttaatgtatatcttttagccgccgtatattccgatttcaatgacgaagtgacgtcattaaacgattacacacaggatgaattaattaatgttttaccatttgacatcaaaaagctgttgtatctaaaatttaagacgaaagaaacgaatagaatatactctattcttcaagagatgtctgaaacgtattctcttccaccacatccatcaattgtaaaagttttattgggagaattggtcagacaatttttttataataattctcgtattaagtataacgataccaagttacttaaaatggttacatcagttataaaaaataaagaagacgctaggaattacatagatgatattgtaaacggtcacttctttgtatcgaataaagtatttgataaatctcttttatacaaatacgaaaacgatattattacagtaccgtttagactttcctacgaaccatttgtttggggagttaactttcgtaaagaatataacgtggtatcttctccataaaactgatgagatatataaagaaataaatgtcgagctttgttaccaatggatacctttccgttacattggaaccacacgagctgacgttagacataaaaactaatattaggaatgccgtatataagacgtatctccatagagaaattagtggtaaaatggccaagaaaatagaaattcgtgaagacgtggaattacctctcggcgaaatagttaataattctgtagttataaacgttccgtgtgtaataacctacgcgtattatcacgttggggatatagtcagaggaacattaaacatcgaagatgaatcaaatgtaactattcaatgtggagatttaatctgtaaactaagtagagattcgggtactgtatcatttagcgattcaaagtactgcttttttcgaaatggtaatgcgtatgacaatggcagcgaagtcactgccgttctaatggaggctcaacaaggtatcgaatctagttttgtttttctcgcgaatatcgtcgactcataaaaaagagaatagcggtaagtataaacacgaatactatggcaataattgcgaatgttttattctcttcgatatatttttgataatatgaaaaacatgtctctctcaaatcggacaaccatctcataaaatagttctcgcgcgctggagaggtagttgccgctcgtataatctctccagaataatatacttgcgtgtcgtcgttcaatttatacggatttctatagttctctgttatataatgcggtttgccctcatgattagacgacgacaatagtgttctaaatttagatagttgatcagaatgaatgtttattggcgttggaaaaattatccatacagcgtctgcagagtggttgatagttgttcctagatatgtaaaataatccaacttactaggcagcaaattgtctagataaaatactgaatcaaacggtgcagacgtattggcggatctaatggaatccaattgattaactatcttttgaaaatatacatttttatgatccaatacttgtaagaatatagaaataatgataagtccatcatcgtgtttttttgcctcttcataagaactatattttttcttattccaatgaacaagattaatctctccagagtatttgtacacatctatcaagtgattggatccataatcgtcttcctttccccaatatatatgtagtgatgataacacatattcattggggagaaaccctccacttatatatcctcctttaaaattaatccttactagttttccagtgttctggatagtggttggtttcgactcattataatgtatgtctaacggcttcaatcgcgcgttagaaattgcttttttagtttctatattaataggagatagttgttgcggcatagtaaaaatgaaatgataactgtttaaaaatagctcttagtatgggaattacaatggatgaggaagtgatatttgaaactcctagagaattaatatctattaaacgaataaaagatattccaagatcaaaagacacgcatgtgtttgctgcgtgtataacaagtgacggatatccgttaataggagctagaagaacttcattcgcgttccaggcgatattatctcaacaaaattcagattctatctttagagtatccactaaactattacggtttatgtactacaatgaactaagagaaatctttagacggttgagaaaaggttctatcaacaatatcgatcctcactttgaagagttaatattattgggtggtaaactagataaaaaggaatctattaaagattgtttaagaagagaattaaaagaggaaagtgatgaacgtataacagtaaaagaatttggaaatgtaattctaaaacttacaacacgggataaattatttaataaagtatatataagttattgcatggcgtgttttattaatcaatcgttggaggatttatcgcatactagtatttacaatgtagaaattagaaagattaaatcattaaatgattgtattaacgacgataaatacgaatatctgtcttatatttataatatgctagttaatagtaaatgaacttttacagatctagtataattagtcagattattaagtataatagacgactagctaagtctattatttgcgaggatgactctcaaattattacactcacggcattcgttaaccaatgcctatggtgtcataaacgagtatccgtgtccgctattttattaactactgataacaaaatattagtatgtaacagacgagatagttttctctattctgaaataattagaactagaaacatgtttagaaagaaacgattatttctgaattattccaattatttgaacaaacaggaaagaagtatactatcgtcatttttttctctagatccagctactactgataatgatagaatagatgctatttatccgggtggcatacccaaaaggggtgagaatgttccagagtgtttatccagggaaattaaagaagaagttaatatagacaattcttttgtattcatagacactcggttttttattcatggcatcatagaagataccattattaataaattttttgaggtaatcttctttgtcggaagaatatctctaacgagtgatcaaatcattgatacatttaaaagtaatcatgaaatcaaggatctaatatttttagatccgaattcaggtaatggactccaatacgaaattgcaaaatatgctctagatactgcaaaacttaaatgttacggccatagaggatgttattatgaatcattaaaaaaattaactgaggatgattgattagaaaatataaattaatttaccatcgtgtatttttataacgggattgtccggcatatcatgtagatagttaccgtctacatcgtatactcgaccatctacgcctttaaatcctctatttattgacattaatctattagaattggaataccaaatattagtaccctcaattagtttattggtaatattttttttagacgatagatcgatggctcttgaaaccaaggttttccaaccggactcattgtcgatcggtgagaagtctttttcattagcatgaatccattctaatgatgtatgtttaaacactctaaacaattggacaaattcttttgatttgctttgaatgatttcaaataggtcttcgtctacagtaggcataccattagataatctagccattataaagtgcacgtttacatatctacgttctggaggagtaagaacgtgactattgagacgaatggctcttcctactatctgacgaagagacgcctcgttccatgtcatatctaaaatgaagatatcattaattgagaaaaaactaataccctcgcctccactagaagagaatacgcatgttttaatgcattctccgttagtgtttgattcttggttaaactcagccaccgccttgattctagtatcttttgttctagatgagaactctatattagagataccaaagactttgaaatatagtaataagatttctattcctgactgattaacaaatggttcaaagactagacatttaccatgggatgctaatattcccaaacatacatctataaatttgacgcttttctcttttaattcagtaaatagagagatatcagccgcactagcatcccctttcaatagttctccctttttaaaggtatctaatgcggatttagaaaactctctatctcttaatgaatttttaaaatcattatatagtgttgctatctcttgcgcgtattcgcccggatcacgattttgtctttcaggaaagctatcgaacgtaaacgtagtagccatacgtctcagaattctaaatgatgatatacctgtttttatttcagcgagtttagccttttgataaatttcttcttgctttttcgacatattaacgtatcgcattaatactgttttcttagcgaatgatgcagacccttctacgtcatcaaaaatagaaaactcgttattaactatatacgaacatagtcctcctagtttggagactaattctttttcatcgactagacgtttattctcaaatagtgattggtgttgtaaggatcctggtcgtagtaagttaaccaacatggtgaattcttgcacactattgacgataggtgtagccgataaacaaatcatcttatggttttttaacgcaatggtcttagataaaaaattatatactgaacgagtaggacggatcttaccatcttctttgattaatgatttagaaatgaagttatgacattcatcaatgatgacgcatattctactcttggaattaatagttttgatattagtaaaaaatttatttctaaaattttgatcatcgtaattaataaaaatacaatccttcgttatctctggagcgtatctgagtatagtgttcatccaaggatcttctatcaaagcctttttcaccaataagataatagcccaattcgtataaatatccttaagatgtttgagaatatatacagtagtcattgttttaccgacacccgtttcatggaacaataaaagagaatgcatactgtctaatcctaagaaaactcttgctacaaaatgttgataatccttgaggcgtactacgtccgaccccatcatttcaacgggcatattagtagttctgcgtaaggcataatcgatataggccgcgtgtgatttactcatttatgagtgataagtaataactatgttttaaaaatcacagcagtagtttaactagtcttctctgatgtttgttttcgatactttttgaatcagaagtcatactagaataaagcaacgagtgaacgtaatagagagcttcgtatactctattcgaaaactctaagaacttattaatgaattccgtatccactggattgtttaaaatactaaattgaacactgttcacatccttccaagaagaagacttagtgacggacttaacatgagacataaataaatccaaattttttttacaaacatcactagccaccataatggcgctatctttcaaccagctatcgcttacgcattttagcagtctaacatttttaaagagactacaatatattctcatagtatcgattacacctctaccgaataaagttggaagtttaataatacaatatttttcgtttacaaaatcaaataatggtcgaaacacgtcgaaggttaacatcttataatcgctaatgtatagattgttttcagtgagatgattattagatttaatagcatctcgttcacgtttgaacagtttattgcgtgcgctgaggtcggcaactacggcgtccgctttagtactcctcccataatactttacgctattaatctttaaaatttcatagactttatctagatcgctttctggtaacatgatatcatgtgtaaaaagttttaacatgtcggtcggcattctatttagatcattaactctagaaatctgaagaaagtaattagctccgtattccagactaggtaatgggcttttacctagagacagattaagttctggcaatgtttcataaaatggaagaaggacatgcgttccctcccggatattttttacaatttcatccatttacaactctatagtttgttttcattattattagttattatctcccataatcttggtaatacttaccccttgatcgtaagataccttatacaggtcattacatacaactaccaattgtttttgtacataatagattggatggttgacatccatggtggaataaactactcgaacagatagtttatctttccccctagatacattagccgtaatagttgtcggcctaaagaatatctttggtgtaaagttaaaagttagggttcttgttccattattgctttttgtcagtagttcattataaattctcgagatgggtccgttctctgaatatagaacatcatttccaaatctaacttctagtctagaaataatatcggtcttattcttaaaatctattcccttgatgaagggatcgttaatgaacaaatccttggcctttgattcggctgatctattatctccgttatagacgttacgttgactagtccaaagacttacaggaatagatgtatcgatgatgttgatactatgtgatatgtgagcaaagattgttctcttagtggcatcactatatgttccagtaatggcggaaaactttttagaaatgttatatataaaagaattttttcgtgttccaaacattagcagattagtatgaagataaacactcatattatcaggaacattatcaatttttacatacacatcagcatcttgaatagaaacgataccatcttctggaacctctacgatctcggcagactccggataaccagtcggtgggccatcgctaacaataactagatcatccaacaatctactcacatatgcatctatataatctttttcatcttgtgagtaccctggatacgaaataaatttattatccgtatttccataataaggtttagtataaacagagagagatgttgccgcatgaacttcagttacagtcgccgttggttggtttatttgacctattactctcctaggtttctctataaacgatggtttaatttgtacattcttaaccatatatccaataaagctcaattcaggaacataaacaaattctttgttgaacgtttcaaagtcgaacgaagagtcacgaataacgatatcggatactggattgaaggttaccgttacggtaatttttgaatcggatagtttaagactgctgaatgtatcttccacatcaaacggagttttaatataaacgtatactgtagatggttctttaatagtgtcattaggagttaggccaatagaaatatcattaagttcactagaatatccagagtgtttcaaagcaattgtattattgatacaattattatataattcttcgccctcaatttcccaaataacaccgttacacgaagagatagatacgtgattaatacatttatatccaacatatggtacgtaactgaatcttcccatacctttaacttctggaagttccaaactcagaaccaaatgattaagcgcagtaatatactgatccctaatttcgaagctagcgatagcctgattgtctggaccatcgtttgtcataactccggatagagaaatatattgcggcatatataaagttggaatttgactatcgactgcgaagacattagaccgtttaatagagtcatccccaccgatcaaagaattaatgatagtattattcattttctatttaaaatggaaaaagcttacaataaactccgtagagaaatatctataatttgtgagttttccttaaagtaacagcttccgtaaacgccgtctttatctcttagtaggtttattgtatttatgaccttttccttatcttcatagaatactaaaggcaacaaagaaatttttggttcttctctaagagctacgtgagacttaaccatagaagccaacgaatccctacatattttagaacagaaataccctacttcaccacccttgtatgtctcaatactaataggtctaaaaaccaaatcttgattacaaaaccaacacttatcaattacactatttgtcttaatagacacatctgccatagatttataatactttggtagtatacaagcgagtgcttcttctttagcgggcttaaagactgctttaggtgctgaaataaccacatctggaaggcttactcgcttagccatttaattacggaactatttttttatacttctaatgagcaagtagaaaacctctcatctacaaaaacgtactcgtgtccataatcctctaccatagttacacgttttttagatctcatatgtgctaaaaagttttcccatactaattggttactattatttttcgtataatttttaacagtttgaggttttagatttttagttacagaagtgatatcgaatattttatccaaaaagaatgaataattaattgtcttagaaggagtgttttcttggcaaaagaataccaagtgcttaaatatttctactacttcattaatcttttctgtactcagattcagtttctcatcttttacttgattgattatttcaaagactaacttataatcctttttatttattctctcgttagccttaagaaaactagatacaaaatttgcatctacatcatccgtggatatttgatttttttccatgatatccaagagttccgagataatttctccagaacattgatgagacaataatctccgcaatacatttctcaaatgaataagtttattagacacgtggaagtttgactttttttgtacctttgtacatttttgaaataccgactcgcaaaaaatacaatattcatatccttgttcagatactataccgttatgtctacaaccgctacataatcgtagattcatgttaacactctacgtatctcgtcgtccaatattttatataaaaacattttatttctagacgttgccagaaaatcctgtaatatttttagttttttgggctgtgaataaagtatcgccctaatattgttaccgtcttccgccaatatagtagttaaattatccgcacatgcagaagaacaccgcttaggcggattcagtacaatgttatatttttcgtaccaactcatttaaatatcataatctaaaatagttctgtaatatgtctagcgctaatatattgatcataatcctgtgcataaattaagatacaacaatgtctcgaaatcatcgacatggcttcttccatagttagaagatcgtcgtcaaagttagcaacgtgattcatcaacatttgctgttttgaggcagcaaatactgaaccgtcgccattcaaccattcataaaaaccatcgtctgaatccattgataatttcttgtactggtttttgagagctcgcatcaatctagcatttctagctcccggattgaaaacagaaagaggatcgtacatccagggtccattttctgtaaatagaatcgtataatgtcccttcaagaagatatcagacgatccacaatcaaagaattggtctccgagtttgtaacaaactgcggactttaacctatacatgataccgtttagcataatttctggtgatacgtcaatcggagtatcatctattagagatctaaagccggtgtaacattctccaccaaacatattcttattctgacgtcgttctacataaaacatcattgctccattaacgataacaggggaatgaacagcactacccatcacattagttcccaatggatcaatgtgtgtaactccagaacatcttccatagcctatgttaggaggagcgaacaccactcttccactattgccatcgaatgccatagaataaatatccttggaattgatagaaatcggactgtcggatgttgtgatcatcttcataggattaacaactatgtatggtgccgcctgaagtttcatatcgtaactgatgccgtttataggtctagccacagaaaccaacgtaggtctaaatccaactatagacaaaatagaagccaatatctgttcctcatctgtcataacttgagagcatccagtatgaataatcttcattagatggggatctaccgcatcatcatcgttacaataaaaaattcccattctaatgttcataattgcttttctaatcatggtatgcatgtttgctctctgaatctctgtggaaattagatctgatacacctgtaatcactatcggattatcctccgtaagacgattaaccaacaacatataattataagactttacttttctaaattcataaagttgctggattaggctataggtgtctccatgtacatacgcgttctcgagcgcaggaagtttaataccgaatagtgccatcagaataggatgaatatagtaattagtttctggttttctataaataaaagacaaatcttgtgaactagacatatcggtaaaatgcatggattggaatcgtgtagtcgacagaagaatatgatgattagatggagagtatattttatctaactctttgagttggtcaccgattctaggactagctcgagaatgaataagtactaaaggatgagtacatttcacagaaacactagcattgttcaatgtgctctttacatgggtaaggagttgaaatagctcgtttctatttgttctgacaatatttagtttattcataatgttaagcatatcctgaatagtaaagttagatgtgtcatacttgttagtagttagatatttagcaattgcattcccatcatttctcaatctcgtactccaatcatgcgtggatgctacttcgtcgatggaaaccatacaatcctttttgataggctgttgagattgattatttcctgcacgtttaggtttggtacgttgatttctagcccctgcggatataaagtcatcgtctacaatttgggacaatgaattgcatacactacaagacaaagatttatcagaagtgtgaatatgatcttcatctaccaaagaaagagtttgattagtataactagattttagtcctgcgttagatgttaaaaaaacatcgctattgaccacggcttccattatttatattcgtagtttttactcgaaagcgtgattttaatatccaatcttattacttttggaatcgttcaaaacctttgactaattgtagaatttgatctattgccctacgcgtatactcccttgcatcatatacgttcgtcaccagatcgtttgtttcggcctgaagttggtgcatatctctttcaacattcgacatgagatccttaagggccatatcgtctagattttgttgagatgctgctcctggatttggattttgttgtgctgttgtacatactgtaccaccagtaggtgtaggagtacatacagtggccacaataggaggttgaggaggtgtaaccgttggagtagtacaagaaatatttccatccgattgttgtgtacatgtagttgttggtaacgtctgagaaggttgggtagatggcggtgtcgtcgtcttttgatctttattaaatttagagataatatcctgaacagcattgctcggcgtcaacgctggaaggagtgaactcgccggcgcatcagtatctgcagacagccaatcaaaaagattagacatatcagatgatgtattagtttgttgtcgtggttttggtgtaggagcagtactactaggtagaagaataggagccggtgtagctgttggaaccggctgtggagttatatgaatagttggttgtagcggttggataggctgtctgctggcggccatcatattatctctagctagttgttctcgcaactgtctttgataatacgactcttgagactttagtcctatttcaatcgcttcatcctttttcgtatccggatccttttcttcagaataatagattgacgactttggtgtagaggattctgccagcctctgtgagaacttgttaaagaagtccatttaaggctttaaaattgaattgcgattataagattaaatggcagacacagacgatattatcgactatgaatccgatgatctcaccgaatacgaggatgatgaagaagaggaagaagatggagagtcactagaaactagtgatatagatcccaaatcttcttataagattgtagaatcagcatccactcatatagaagatgcgcattccaatcttaaacatatagggaatcatatatctgctcttaaacgacgctatactagacgtataagtctatttgaaatagcgggtataatagcagaaagctataacttgcttcaacgaggaagattacctctagtttcagaattttctgacgaaacgatgaagcaaaatatgctacatgtaattatacaagagatagaggagggttcttgtcctatagtcatcgaaaagaacggagaattgttgtcggtaaacgattttgacaaagatggtctaaaattccatctagactatattatcaaaatttggaaacttcaaaaacgatattagaatttatacgaatatcgttctctaaatgtcacaatcaagtctcgcatgttcagcaatttattgtcgtactttatatcgtgttcattaacgatattttgcaaaatagtaatgattctatcttccttcgatagatattcttcagagattattgtcttatattctttcttgttatccgatatgaatttgataagactttgaacattattgatacccgtctgtttaattttttctacagatattttagttttggcagattctatcgtatctgtcaatagacatccaacatcgacattcgacgtcaattgtctataaatcaacgtataaattttagaaataacattagcgaattgttgtgcattgatgtcgttattctgaaacagtatgattttaggtagcattttcttaacaaagagaacgtatttattgttactcagttgaacagatgatatatccagattactaacgcatctgattccgtataccaaactttcagaagaaatggtatacaattgtttgtattcattcaatgtctctttttcagaaattagtttagagtcgaatactgcaataattttcaagagatagttttcatcagataagattttatttagtgtagatatgataaaactattgttttgttggagaacttgatacgccgcgttctctgtagtcgacgctctcaaatgggaaacaatctccattatttttttggaatcggatactatatcttcggtatcttgacgcagtctagtatacatagagttaagagagattagagtttgtacattaagcaacatgtctctaaatgtggctacaaacttttcctttttcacatcatctagtttattatataccgatttcacaacggcaccagatttaaggaaccagaatgaaaaactctgataactacaatatttcatcatagttacgattttatcatcttctatagttggtgtaatagcgcatacctttttctccaagactggaaccaacgtcataaaaatgtttaaatcaaaatccatatcaacatctgatgcgctaagaccagtctcgcgttcaagattatctttactaatggtgacgaactcatcgtataaaactctaagtttgtccattatttatttacagatttagttgtttaatttatttgtgctcttccagagttgggatagtatttttctaacgtcggtattatattattaggatctacgttcatatgtatcataatattaatcatccacgttttgataaatctatctttagcttctgaaataacgtatttaaacaaaggagaaaaatatttagctacggcatcagacgcaataacattttttgtaaatgtaacgtatttagacgacagatcttcgttaaaaagttttccatctatgtagaatccatcggttgttaacaccattcccgcgtcagattgaataggagtttgaatagtttgttttggaaatagatccttcaataacttatagttgggtgggaaaaaatcgattttatcactagactctttcttttttactatcattacctcatgaactatttcttgaatgagtatatgtattttctttcctatatcggacgcgttcattggaaaatataccatgtcgttaactataagaatatttttatcctcgtttacaaactgaataatatcagatgtagttcgtaaacgaactatatcatcaccagcacaacatctaactatatgatatccactagtttcctttagccgtttattatcttgttccatattagcagtcattccatcatttaagaaggcgtcaaagataatagggagaaatgacattttggattctgttacgactttaccaaaattaaggatatacggacttactatctttttctcaacgtcaatttgatgaacacacgatgaaaatgtgcttctatgagattgatcatgtagaaaacaacaagggatacaatatttccgcatatcatgaaatatattaagaaatcccaccttattatatttccccaaaggatccatgcacgtaaacattatgccgttatcattaataaagacttctttctcatcggatctgtaaaagttgttactgatttttttcattccaggatctagataattaataatgatgggttttctattcttattctttgtattttggcatatcctagaccagtaaacagtttccactttggtaaaatcagcagacttttgaacgctattaaacatggcattaatggcaataactaaaaatgtaaaatatttttctatgttaggaatatggtttttcactttaatagatatatggtttttggccaaaatgatagatatttttttatccgaggatagtaaaatattattagtcgccgtctctataaaaatgaagctagtctcgatatccaattttattctagaattgataggagtcgccaaatgtaccttatacgttatatctcccttgatgcgttccatttgtgtatctatatcggacacaagatctgtaaatagttttacgttattaatcatcacggtatcgccgtcgctagataacgctaatgtaccatccaagtcccaaatggagagatttaactgttcatcgtttagaataaaatgattaccggtcatattaataaagtgttcatcgtatctagataacaacgacttataattaatgtccaagtcttgaactcgctgaatgatcttttttaacccagttagttttagattggtacgaaatatattgttaaactttgattctacagtaatgtccaaatctagttgtggaaatacttccatcaacattgtttcaaacttgataatattattatctacatcttcgtacgatccaaattccggaatagatgtatcgcacgctctggccacccagataaccaaaaagtcacacgctccaggatatacattgtataaaaagctatcgttttttagtagggtttttttctgcgtgtatacgaagggattaaaaatagtattatcaacgtaactatattccaaattattcttatgagaatagataataatatcgtccttaatatctaacaaatttcctaaatatccctttaattgagtcattcgaagcgtcaatagaatatgtctcttaactatttccggctgttgtatatttaaatgacttcgtaaaaaataatatatgggcgacttctcatctatgtaatcatatggagtgagatatagggctcgttctacctcctgccccttacccacctgtaataccaattgcggacttactatatatcgcatatttatatcgtggggtaaagtgaaaatctactaccgatgatgtaagtcttacaatgttcgaaccagtaccagatcttaatttggaggcctccgtagaactaggggaggtaaatatagatcaaacaacacctatgataaaggagaatagcggttttatatcccgcagtagacgtctattcgcccatagatctaaggatgatgagagaaaactagcactacgattctttttacaaagactttattttttagatcatagagagattcattatttgttcagatgcgttgacgctgtaaaagacgtcactattaccaaaaaaaataacattatcgtggcgccttatatagcacttttaactatcgcatcaaaaggatgcaaacttacagaaacaatgattgaagcattctttccagaactatataatgaacatagtaagaaatttaaattcaactctcaagtatccatcatccaagaaaaactcggataccagtttggaaactatcacgtttatgattttgaaccgtattactctacagtagctctggctattcgagatgaacattcatctggcatttttaatatccgtcaagagagttatctggtaagttcattatctgaaataacatatagattttatctaattaatctaaaatctgatcttgttcaatggagtgctagtacgggcgctgtaattaatcaaatggtaaatactgtattgattacagtgtatgaaaagttacaactggtcatagaaaatgattcacaatttacatgttcattggctgtggaatcaaaacttccaataaaattacttaaagatagaaatgaattatttacaaaattcattaacgagttaaaaaagaccagttcattcaagataagcaaacgcgataaggatacgctactaaaatattttacttaggactggagttagaatttatagacgactcatttcgtttatcattgttactattattactattactatcattattagtgttggcattattagtattcttcttgtcatcttgttcagaaatatacagcaatgctatacctaatactaaatacattatcatgctcgcaatggctctaacaacaacgaaccaaaatgaatttggtcgtagcttttgttcacaaaaatacataaagaaatgtctacataaatctatggcgccattggctacttgaaatagcgccagtcctcctacagattttaatatagctgtataacatgacatttattcatcatcaaaagagacagagtcaccatctgtcatatttagattttttttcatgtgttcaaagtatcctctactcatttcattataatagtttatcatacttagaattttaggacggatcaatgagtaagacttgactagatcgtcagtagtaatttgtgcatcgtctattctgcatccgcttcgtcgaataatgtatagcatcgctttgagattctccatagctatcaagtctttatacaatgacatggaaatatctgtgaatactttatacttctccaacatcgatgccttaacatcatcgcctactttagcattgaaaatacgttctattgtgtagatggatgtagcaagatttttaaacaacaatgccatcttacacgatgattgcctcaagtctccaatcgtttgtttagaacgattagctacagagtccaatgcttggctgactagcatattattatctttagaaattgtattcttcaatgaggcgtttatcatatctgtgatttcgttagtcatattacagtctgactgggttgtaatgttatccaacatatcacctatggatacggtacacgtaccagcatttgtaataatcctatctaagatgttgtatggcattgcgcagaaaatatcttctcctgtaatatctccactctcgataaatctactcagattattcttaaatgccttattctctggagaaaagatatcagtgtccatcatttcattaatagtatacgcagaaaagataccacgagtatcaattctatccaagatacttatcggttccgagtcacagataatggtttcctctccttcgggagatcctgcatagaaatatctaggacaatagtttctatactgtctgtaactctgataatctctaaagtcactaactgataccatgaaattgagaagatcaaacgctgaagtaattaatttttctgcctcgtttttactacaactagttttcatcaatgtagtgacgatgtattgtttagttacttttggtctaatactgatgatagagatattattgcttcccataatggatcttctagtagtcaccttaaagcccattgatgcgaatagcagatagataaagtcttggtatgactcctttctaatatagtacggactacctttgtcacccaactttatacccacataagccataacaacctctttaatagccgtttcatgaggtttatcagccatgagcctgagtagttggaagaatctcatgaatcccgtctcagaaagtcctatatgcatgatagatttatctttcctgggaaactctcgtatagtcatagatgaaatactctttaaagtttctgaaataagattagtaacagtcttacctccgactactctaggtaacaaacaaactctaataggtgttttctctgcggagataatatcagaaaggatagagcaataagtagtattattgtgattataaagaccgaatacataacaggtagaatttataaacatcatgtcctgaaggtttttagacttgtattcctcgtaatccataccgtcccaaaacatggatttggtaactttgatagccgtagatctttgttccttcgccaacaggttaaagaaattaataaagaatttgttgtttctatttatgtccacaaattgcacgtttggaagcgccacggttacattcactgcagcattttgaggatcgcgagtatgaagtacgatgttattgtttactggtatatctggaaagaaatctaccagtctaggaataagagattgatatcgcatagaaatagtaaagtttataatctcatcatcgaagagcattttgttaccattgtaataaatatccactctgtcatatgtataaatgaagtactgttcaaacatgatgagatgtttatatgttggcatagtagtgagatcgacgtttggtaatggcaatgtattaagattaactccataatgtctagcagcatctgcgatgttataagcgtcgtcaaagcggggtcgatcttgtattgttatatattgtctaacacctataagattatcaaaatcttgtctgcttaatacaccgttaacaatttttgccttgaattcttttattggtgcattaataacatccttatagaggatgttaaacaaataagtgttatcaaagttaagatctggatatttcttttctgctagaacatccattgagtcggagccatctggtttaatataaccaccgataaatctagctctgtattctgtatccgtcaatctaatattaagaaggtgttgagtgaaaggtggaagatcgtaaaagctgtgagtattaatgataggattagtttccgaactaatgttaattggggtattaataatatctatatttccagcgttaagtgtaacattaaacagttttaattcacgtgacgtggtatcaattaaataattaatgcccaatttggatatagcagcctgaagctcatcttgtttagttacggatcctaatgagttattaagcaatatatcgaacggatgaacgaaggttgttttaagttggtcacatactttgtaatctagacatagatgcggaagaacggtagaaactatacgaaataaatattcagagtcctctaattgatcaagagtaactattgacttaataggcatcatttatttagtattaaatgacgaccgtaccagtgacggatatacaaaacgatttaattacagagttttcagaagataattatccatctaacaaaaattatgaaataactcttcgtcaaatgtctattctaactcacgttaacaacgtggtagatagagaacataatgccgccgtagtgtcatctccagaggaaatatcctcacaacttaatgaagatctatttccagatgatgattcaccggccactattatcgaacgagtacaacctcatactactattattgacgatactccacctcctacgtttcgtagagagttattaatatcggaacaacgtcaacaacgagaaaaaagatttaatattacagtatcgaaaaatgctgaagcaataatggaatctagatctatgataacttctataccaacacaaacaccatccttgggagtagtttatgataaagataaaagaattcagatgttagaggatgaagtggttaatcttagaaatcaacgatctaatacaaaatcatctgataatttagataattttaccaaaatactatttggtaagactccgtacaaatcaacagaagttaataagcgtatagccatcgttaattatgcaaatttgaacgggtcccccttatcagtcgaggacttggatgtttgttcggaggatgaaatagatagaatctataaaacgattaaacaatatcacgaaagtagaaaacgaaaaattatcgtcactaacgtgattattattgtcataaacattatcgagcaggcattgctaaaactcggatttgaagaaatcaaaggactgagtaccgatatcacttcagaaattatcgatgtggagatcggagatgactgcgatgctgtagcatctaaactaggaatcggtaacagtccggttcttaatattgtattgtttatactcaagatattcgttaaacgaattaaaattatttaatttaatacattcccatatccagacaacaatcgtctggattaatctgttcctgtcgtctcataccggacgacatattaatctttttattagtgggcatctttttagatggtttctttttcccagcattaactgagtcgatacctagaagatcgtgattgatctctccgaccattccacgaacttctaattggccgtctctgacggtaccataaactattttaccagcattagtaacagcttggacaatctgaccatccatcgcattgtacgatgtagtagtaactgttgttctacgtctaggagcaccagaagtatttttggagcccttggatgttgatgtagaagaagacgaggattttgattttggtttacatgtaatacattttgaactctttgattttgtatcacatgcgccggcagtcacatctgtttgagaattaagattattgttgcctcctttgacggctgcatctccaccgatttgcgctagtagatttttaagctgtggtgtaatcttattaactgtttcgatataatcatcgtaactgcttctaacggctaaattttttttatccgccatttagaagctaaaaatatttttatttatgcagaagatttaactagattatacaatgaactaatatgatccttttccagattatttacaaacttggtattttttggttctggaggaggcgaatttaaattcggacttggattcggattttgtaagttcttgatcttattatacatcgagtataggatggcgacagtaactgctacacaaataccgatcaaaagaagaataccaatcatttattgacaataacttcactattgatcaagtatgcaatatatcatcttttcactaaataagtagtaataatgattcaacaatgtcgagatatatggacgataataatttagttcatggaaatatcgctatgattggtgtgaatgactccgctaactctgtggggtgcgcagtgctttccccacatagaataaattagcattccgactgtgataataataccaagtataaacgccataatactcaatactttccatgtacgagtgggactggtagacttactaaagtcaataaaggcgaagatacacgaaagaatcaaaagaatgattccagcgattagcacgccggaaaaataatttccaatcataagcatcatgtccatttaactaataaaaattttaaatcgccgaatgaacaaagtggaatataaaccatataaaaacaatagtttgtactgcaaaaataatatctatttttgttttcgaagatatggtaaaattaaatagtagtacacagcatgttataactaacagcagcaacggctcgtaattacttatcatttactagacgaaaaggtggtgggatattttcttgctcaaataatacgaatatatcacccatccattttatgcgatgtttatatactctaatctttaatagatctatagacgacgggtttaccaacaatatagattttatcgattcatctaatttaaacccttccttaaacgtgaatgatctattatctggcataacgatgaccctacctgatgaatcggacaatgtactgggccatgtagaataaattatcaacgaattatcgtctacgaacatttatatcatttgttttaattttaggacgcgaataaatggatataaaatagaaaataacagatattacaaccagtgttatggccgcgcccaaccaggtaggcagttttattttatcttttactacaggttctcctggatgtacgtcaccaacggcggacgtagttctagtacaattagacgtaagttccgcttgggaattttttaacgctaaagagttaacgttaatcgtgcacccaacgtatttacatctagttcgttgaacatcttgattataatataaccattttctatctctagattcgtcagtgcactcatgtaaccaacataccctaggtcctaaatatttatctccggaattagattttggataattcgcgcaccaacaatttctatttcctttatgatcgttacaaaagacgtataatgccgtatccccaaaagtaaaataatcaggacgaataattctaataaactcagaacaatatctcgcatccatatgtttggagcaaatatcggaataagtagacatagccggtttccgttttgcacgtaaccattctaaacaattggggtttccaggatcgtttctacaaaatccagtcatgaaatcgtcacaatgttctgtcttgtaattattattaaatatttttggacagtgtttggtatttgtcttagaacaacattttgccacgctatcactatcgcccaggagataatccttttttataaaatgacatcgttgcccggatgctatataatcagtagcgtgttttaaatccttaatatattcaggagttacctcgttctgataatagattaatgatccaggacgaaatttgaaagaactacatggttctccatgaattaatacatattgtttagcaaattcaggaactataaaactactacaatgatctatcgacataccatctatcaaacaaaacttgggtttaatttctcccggagatgtttcataatagtacgtataactttcttctgcaaacttaacagctctattatattcaggataattaaaacctaattccatatatttgtctcgtatatctgctattcctggtgctattttgattctattaagagtaacagctgcccccattcttaataatcgtcagtatttaaactgttaaatgttggtatatcaacatctaccttatttcccgcagtataaggtttgttgcaggtatactgttcaggaatggttacatttatacttcttctatagtcctgtctttcgatgttcatcacatatgcaaagaacagaataaacaaaataatgtaagaaataatattaaatatctgtgaattcgtaaatacattgattgccataataattacagcagctacaatacatacaatagacattcccacagtgttgccattacctccacgatacatttgagttactaagcaataggtaataactaagctagtaagaggcaatagaaaagatgagataaatatcatcaatatagagattagaggagggctatatagagccaagacgaacaaaatcaaaccgagtaacgttctaacatcattatttttgaagattcccaaataatcattcattcctccataatcgttttgcatcatacctccatctttaggcataaacgattgctgctgttcctctgtaaataaatctttatcaagcactccagcacccgcagagaagtcgtcaagcatattgtaatatcttaaataactcatttatatattaaaaaatgtcactattaaagatggagtataatctttatgccgaactaaaaaaaatgacttgtggtcaacccctaagtctttttaacgaagacggggatttcgtagaagttgaaccgggatcatcctttaagtttctgatacctaagggattttacgcctctccttccgtaaagacgagtctagtattcgagacattaacaacgaccgataataaaatcactagtatcaatccaacaaatgcgccaaagttatatcctcttcaacgcaaagtcgtatctgaagtagtttctaatatgaggaaaatgatcgaatcaaaacgtcctctatacattactcttcacttggcgtgtggatttggtaagactattaccacgtgttatcttatggctacacacggtagaaaaaccgtcatttgcgtacccaataaaatgttaatacatcaatggaagacacaggtagaggcagtcggattggaacataagatatccatagatggagtaagtagtctattaaaggaactaaagactcaaagtccggatgtattaatagtagtcagtagacatctgacaaacgatgccttttgtaaatatatcaataagcattatgatttgttcatcttggatgaatcacatacgtataatctgatgaacaatacagcagttacaagatttttagcgtattatcctccgatgatgtgttattttttaactgctacacctagaccatctaaccgaatttattgtaacagtattattaatattgccaagttatccaatctaaaaaaaactatctatgcagtagatagtttttttgagccatattccacagataatattagacatatggtaaaacgactagatggaccatctaataaatatcatatatataccgagaagttattatctgtagacgagcctagaaatcaacttattcttgataccctggtagaagaattcaagtcaggaactattaatcgcattttagttattactaaactacgtgaacatatggtattattctacaaacgattattagattttttcggaccagaggttgtatttataggagacgcccaaaatagacgtactccagatatggtcaaatcaatcaaggaactaaatagatttatattcgtatccaccttattttattccggtactggtttagatattcctagtttggattcgttgttcatttgctcggcagtaatcaacaatatgcaaatagagcaattactagggagggtatgtcgagaaacagaactattagataggacggtatatgtatttcctaacacatccatcaaagaaataaagtacatgataggaaatttcatgcaacgaattattagtctgtctgtagataaactaggatttaaacaaaaaagttatcggaaacatcaagaatccgatcccacttctgcatgtacaacatcatccagagaagaacgtgtattaaatagaatatttaactcgcaaaatcgttaagaagtttaagcgacgatccgcatgctgcgcaggccagtgtattacccctcatagtattaatataatccaatgatacttttgtgatgtcggaaatcttaaccaatttagactgacaggcagaacacgtcatgcaatcatcatcgtcatcgataactgtagtcttgggcttctttttgcgactcttcattccggaacgcacattggtgctatccatttaggtagtaaaaaataagtcagaatatgccctataacacgatcgtgcaaaacctggtatatcgtctctatctttatcacaatatagtgtatcgacatttttattattattgacctcgtttatcttggaacatggaatgggaacatttttgttatcaacggccatctttgccttaattccagatgttgtaaaattataactaaacagtctatcatcgacacaaatgaaattcttgtttagacgtttgtagtttacgtatgcggctcgttcgcgtctcattttttcagatattgcaggtactataatattaaaaataagaatgaaataacataggattaaaaataaagttatcatgacttctagcgctgatttaactaacttaaaagaattacttagtctgtacaaaagtttgagattttcagattctgcggctatagaaaagtataattctttggtagaatggggaacatctacttactggaaaataggcgtgcaaaaggtagctaatgtcgagacgtcaatatctgattattatgatgaggtaaaaaataaaccgtttaatattgatccgggctattacattttcttaccggtatattttgggagcgtctttatttattcgaagggtaaaaatatggtagaacttggatctggaaactcttttcaaataccagatgatatgcgaagtgcgtgtaacaaagtattagacagcgataacggaatagactttctgagatttgttttgttaaacaatagatggataatggaagatgctatatcaaaatatcagtctccagttaatatatttaaactagctagtgagtacggattaaacatacccaaatatttagaaattgaaatagaggaagacacattatttgacgacgagttatactctattatagaacgctctttcgatgataaatttccaaaaatatccatatcgtatattaagttgggagaacttagacggcaagttgtagactttttcaaattctcattcatgtatattgagtccatcaaggtagatcgtataggagataatatttttattcctagcgttataacaaaatcaggaaaaaagatattagtaaaagatgtagaccatttaatacgatccaaggttagagaacatacatttgtaaaagtaaaaaagaaaaacacattttccattttatacgactatgatggaaacggaacagaaactagaggagaagtaataaaacgaattatagacactataggacgagactattatgttaacggaaagtatttctctaaggttggtagtgcaggcttaaagcaattgactaataaattagatattaatgagtgcgcaactgtcgatgagttagttgatgagattaataaatccggaactgtaaaacgaaaaataaaaaaccaatcagcatttgatttaagcagagaatgtttgggatatccagaagcggattttataacgttagttaataacatgcggttcaaaatagaaaattgtaaggttgtaaatttcaatattgaaaatactaattgtttaaataacccgagtattgaaactatatatggaaactttaaccagttcgtctcaatctttaatgtcgtcaccgatgtcaaaaaaagattattcgagtgaaataatatgcgcctttgatataggtgcaaaaaatcctgccagaactgttttagaagtcaaggataactccgttagggtattggatatatcaaaattagactggagttctgattgggaaaggcgcatagctaaagatttgtcacaatatgaatacactacagttcttctagaacgtcagcctagaaggtcgccgtatgttaaatttatctattttattaaaggctttttatatcatacatcggctgccaaagttatttgcgtctcgcctgtcatgtctggtaattcatatagagatcgaaaaaagagatcggtcgaagcatttcttgattggatggacacattcggattgcgagactccgttccggatagacgcaaattagacgatgtagcggatagtttcaatttggctatgagatacgtattagataaatggaatactaattatacaccttataataggtgtaaatctagaaattacataaaaaaaatgtaataacgttagtaacgccattatggataatctatttacctttctacatgaaatagaagatagatatgccagaactatttttaactttcatctaataagttgcgatgaaataggagatatatatggtcttatgaaagaacgcatttccttagaggatatgtttgataatatagtgtataataaagatatacatcctgccattaagaaactagtgtattgcgacatccaacttactaaacacattattaatcagaatacgtatccggtatttaacgattcttcacaagtgaaatgttgtcattatttcgacataaactcagataatagcaatattagctctcgtacagtagagatatttgagagggaaaagtcatctcttgtatcatatattaaaactaccaataagaagagaaaggtcaattacggcgaaataaagaaaactgttcatggaggcactaatgcaaattacttttccggtaaaaagtctgacgagtatctgagtactacagttagatccaacattaatcaaccttggatcaaaaccatctctaagaggatgagagttgatatcattaatcactctatagtaacgcgtggaaaaagctctatattacaaactatagaaattatttttactaatagaacatgtgtgaaaatattcaaggattctactatgcacattattctatccaaggacaaggatgaaaaggggtgtatacacatgattgacaaattattctatgtctattataatttatttctgttgttcgaagatatcatccaaaacgagtactttaaagaagtagctaatgttgtaaaccacgtactcacggctacggcattagatgagaaattattcctaattaagaaaatggctgaacacgatgtttatggagttagcaatttcaaaatagggatgtttaacctgacatttattaagtcgttggatcataccgttttcccctctctgttagatgaggatagcaaaataaagttttttaaggggaaaaagctcaatattgtagcattacgatctctggaggattgtataaattacgtgactaaatccgagaatatgatagaaatgatgaaggaaagatcgactattttaaatagcatagatatagaaacggaatcggtagatcgtctaaaagaattgcttctaaaatgaaaaaaaacactgattcagaaatggatcaacgactcggatataagtttttggtgcctgatcctaaagccggagttttttatagaccgttacatttccaatatgtatcgtattctaattttatattgcatcgattgcatgaaatcttgaccgtcaagcggccactcttatcgtttaagaataatacagaacgaattatgatagaaattagcaatgttaaagtgactcctccagattactcacctataatcgcgagtattaaaggtaagagttatgacgcattagccacgttcactgtaaatatctttaaagaggtaatgaccaaagagggtatatccatcactaaaataagtagttatgagggaaaagattctcatttgataaaaattccgctactaataggatacgggaataaaaatccacttgatacagccaagtatcttgttcctaatgtcataggtggagtctttatcaataaacaatctgtcgaaaaagtaggaattaatctagtagaaaagattacaacatggccaaaatttagggttgttaagccaaactcattcactttctcgttttcctccgtatcccctcctaatgtattaccgacaagatatcgccattacaagatatctctggatatatcacaattggaagcgttgaatatatcatcgacaaagacatttataacggtcaatattgttttgctgtctcaatatttatctagagtgagtctagaattcattagacgtagtttatcatacgatatgcctccagaagttgtctatctagtaaacgcgataatagatagtgctaaacgaattactgaatctattactgactttaatattgatacatacattaatgacctggtggaagctgaacacattaaacaaaaatctcagttaacgattaacgagttcaaatatgaaatgctgcataactttttacctcatatgaactatacacccgatcaactaaagggattttatatgatatctttactaagaaagtttctctactgtatcttccacacttctagatatccagatagagattcgatggtttgtcatcgcatcctaacgtacggcaaatattttgagacgttggcacatgatgaattagagaattacataggcaacatccgaaacgatatcatgaacaatcacaagaacagaggcacttacgcggtaaacattcatgtactaacaactcccggacttaatcacgcgttttctagcttattgagtggaaagttcaaaaagtcagacggtagttatcgaacacatcctcactattcatggatgcagaatatttctattcctaggagtgttggattttatccggatcaagtaaagatttcaaagatgttttctgtcagaaaataccatccaagtcaatatctttacttttgttcatcagacgttccggaaagaggtcctcaggtaggtttagtatctcaattgtctgtcttgagttccattacaaatatactaacgtctgagtatttggatttggaaaagaaaatttgtgagtatatcagatcatattataaagatgatataagttactttgaaacaggatttccaatcactatagaaaatgctctagtcgcatctcttaatccaaatatgatatgtgattttgtaactgactttagacgtagaaaacggatgggattcttcggtaacttggaggtaggtattactttagttagggatcacatgaatgaaattcgcattaatattggagcgggaagattagtcagaccattcttggttgtggataacggagagctcatgatggatgtgtgtccggagttagaaagcagattagacgacatgacattctctgacattcagaaagagtttccgcatgtcatcgaaatggtagatatagaacaatttacttttagtaacgtatgtgaatcggttcaaaaatttagaatgatgtcaaaggatgaaagaaagcaatacgatttatgtgactttcctgccgaatttagagatggatatgtagcatcttcactagtgggaatcaatcacaattctggacccagagctattcttggatgtgctcaagctaaacaagctatctcttgtctgagttcggatatacgaaataaaatagacaatggaattcatttgatgtatccagagaggccaatcgtgattagtaaggctttagaaacttcaaagattgcggctaattgcttcggccaacatgttactatagcattaatgtcgtacaaaggtatcaatcaagaggatggaattatcatcaaaaaacaatttattcagagaggcggtctcgatatagttaccgcaaagaaacatcaagtagaaattccattggaaaactttaataacaaagaaagagataggtctaacgcctattcaaaattagaaagtaatggattagttagactgaatgctttcttggaatccggagacgctatggcacgaaatatctcatcaagaactcttgaagatgattttgctagagataatcagattagcttcgatgtttccgagaaatataccgatatgtacaaatctcgcgttgaacgagtacaagtagaacttactgacaaagttaaggtacgagtattaaccatgaaagaaagaagacccattctaggagacaaatttaccactagaacgagtcaaaagggaacagtcgcgtatgtcgcggatgaaacggaacttccatacgacgaaaatggtatcacaccagatgtcattattaattctacatccatcttctctagaaaaactatatctatgttgatagaagttattttaacagccgcatattctgctaagccgtacaacaataagggagaaaaccgacctgtctgttttcctagtagtaacgaaacatccatcgatacatatatgcaattcgctaaacaatgttatgagcattcaaatccgaaattgtccgatgaagaattatcggataaaatcttttgtgaaaagattctctatgatcctgaaacggataagccttatgcatccaaagtattttttggaccaatttattacttgcgtctgaggcatttaactcaggacaaggcaaccgttagatgtagaggtaaaaagacgaagctcattagacaggcgaatgagggacgaaaacgtggaggaggtatcaagttcggagaaatggagagagactgtttaatagcgcatggtgcagccaatactattacagaagttttgaaagattcggaagaagattatcaagatgtgtatgtttgtgaaaattgtggagacatagcagcacaaatcaagggtattaatacatgtcttagatgttcaaaacttaatctctctcctctcttaacaaaaattgataccacgcacgtatctaaagtatttcttactcaaatgaacgccagaggcgtaaaagtcaaattagatttcgaacgaaggcctccttcgttttataaaccattagataaagttgatctcaagccgtcttttctggtgtaatattctagtttggtagtagatacatatcaatatcatcaaattcgagatccgaattataaaatgggcgtggattgttaactatagaatcggacgtctgatattcgaaaatctgtggagtttcaggttttggtggaggtgtaactgctacttgggatactgaagtctgatattcagaaagctgtggatgttctggttcggcatccaccgatggtgtcacatcactaatcggttcggtaacgtctgtggatggaggtgctacttctacagaacctgtagcctcagttgtcaacggagatacatttttaatgcgagaaaatgtataatttggtaatggtttcttatgtggatctgaagaagaggtaagatatctactagaaagataccgatcacgttctagttctcttttgtagaacttaactttttctttctccgcatctagttgatattccaacctcttcacgttactacgttcagattccaattcacgttcgcatgggttacctccgcagtttttacgagcgatttcacgttcagccttcatgcgtctctccctctctctatcgagtttatcagagcagtctttctgaaggcgatcgaactccataaatttctccaacgctttgattgtttccatagatttccgaagttcagcttttaggactgtgattctttttctttcgaattcacagctggatgtacaaccgtttccattaccgccatctctaagtttcttttctagatcggcaacatttcatccccatgccttttacattcctcgagtctactgtcgtcgaaatatcgttccagctccttttcgacatcaataactttagcacgttgtctctcaagctctcttttgtagttatctgattccctggcacgtttaagatcttcatgcaattgagtcagctcttaacttcctctcttgcttcttcgtcatagtacgcgcaatcactgtgagatccattgttaccacgtctacactcggcgagctcgcgtttaagagattcaatttcccgtttgtattggtccatgtttccattgctaccaccattagatttacaggctgctagttgtcgttcgagatcagaaatacgggttttcttggaattgatttcgtcgatgtacttggcatcgaaacacttattaagttctttttccaattctacgattttatttctttcgcgagtcaattccctcctgtagtaactatctgttttgtcagattcacgctctctacgtagactttcttgcaagttactaatttgttccctagcacgtccgagtttagttttatatgctgaatagagttctgattcatcctttgagcagatctctagcgatcgtttaagattcctaattctagtctttagcctatttacctcctcagaagatgttccgttaccgttgcgtttacactcgttaagctgtctatcaagatccatgattctatctctaagacgttgcatctctctttccatatcagcattgctttcattattacgtctgcagtcactcaactgtctttcaatatctgagattctatctctaagacgtcgcatctctctctgtttcggcattggtttcattattacgtctacagtcgttcaactgtctttcaagatctgatattctagattggagtctgctaatctctgtagcattttcacggcattcactcagttgtctttcaagatctgaaattttagattggagtctgctaatctctgtaagatttcctcctccgctctcgatgcagtcggtcaacttattctctagttctctaatacgcgaacgcagtgcatcaacttcttgcgtgtcttcctggttgcgtgtacattcatcgagtctagattcgagatctctaacgcgtcgtcgttcttcctcaagttctctgcgtactacagaaagcgtgtccctatcttgttgatatttagcaatttctgattctagagtactgattttgcttacgtagttactaatatttgtcttggccttatcaagatcctccttgtatttgtcgcattccttgatatccctacgaagtctggacagttcccattcgacattacgacgtttatcgatttcagctcggagatcgtcatcgcgttgttttagccacatacgactgagttcaagttctcgttgacaagatccatctacttttccattcctaatagtatccagttccttttctagttctgaacgcatttctcgttccctatcaagcgattctctcaattctcggatagtcttcttatcaatttctaataaatctgaaccatcatctgtcccattttgaatatccctgtgttctttgatctcttttgtaagtcggtcgattctttcggttttataaacagaatccctttccaaagtcctaatcttactgagtttatcactaagttctgcattcaattcggtgagttttctcttggcttcttccaactctgttttaaactctccactatttccgcattcttcctcgcatttatctaaccattcaattagtttattaataactagttggtaatcagcgattcctatagccgttcttgtaattgtgggaacataattaggatcttctaatggattgtatggcttgatagcatcatctttatcattattagggggatggacaaccttaattggttggtcctcatctcctccagtagcgtgtggttcttcaataccagtgttagtaataggcttaggcaaatgcttgtcgtacgcgggcacttcctcatccatcaagtatttataatcgggttctacttcagaatattcttttctaagagacgcgacttcgggagttagtagaagaactctgtttctgtatctatcaacgctggaatcaatactcaagttaaggatagcgaatacctcatcgtcatcatccgtatcttctgaaacaccatcatatgacatttcatgaagtctaacgtattgataaatagaatcagatttagtattaaacagatccttaacctttttagtaaacgcatatgtatattttagatctccagatttcataatatgatcacatgccttaaatgtcagtgcttccatgatataatctggaacactaatgggtgacgaaaaagatacagcaccatatgctacgttgataaataaatctgaaccactaagtagataatgattaatgttaagaaagaggaaatattcagtgtataggtatgtcttggcgtcatatcttgtactaaacacgctaaacagtttgttaatgtgatcaatttccaatagattaattagagcagcgggaataccaacaaacatattaccacatccgtattttctatgaatatcacatatcatgttaaaaaatcttgatagaagagcgaatatctcgtctgacttaatgagtcgtagttcagcagcaacataagtcataactgtaaatagaacatactttcctgtagtgttgattctagactccacatcaacaccattattaaaaatagttttatatacatctttaatctgctctccgttaatcgtcgaacgttctagtatacggaaacactttgatttcttatctgtagttaatgacttagtgatatcacgaagaatattacgaattacatttcttgtttttcttgagagacctgattcagaactcaactcatcgttccatagtttttctacctcagtggcgaaatctttggagtgcttggtacatttttcaataaggttcgtgacctccatttattataaaaaatttattcaaaacttaactacaatcgggtaattataaaatcgtagatctcccatgtggcggaatactaccatctatcgcatgtggatggacagtaggtaatggccatgggaacagtaatgtttgcatatttatctttcttgccagtattactgcatattgtcccaatgtttcgatgtgatgttctaacctatcaactgccgctgtatcacaacaatagtgtccgatgaaattaagattatgatccaatgtgtttaatatatgattatcaagtcttatacgatccgcgtcttttttgacaggatcaggttcttctacaggaagaagtttcggcctcttatgatattcatgtctgggaaacggtggtctagggtgaggctccggtatcggagtgggttttggattataatcatcatcgtctatgacatcatcttcgacttcgatatttattttgctatcttgatgatgtcctgtatcagttgcattttcagcactcgactgaatattagcgcattcattgtctattattaccatatttctaaacccaaaatgtatgtgttgaacatcagtactatcgttgatgagtcttatagcatgaattcgcttatcgttatcgggtttatcttctgtcaccttagcaattccttttttattaaactctacataatcatatccatttctattgtttgttctaatataaacgagtatagcatcattgctaaatttttcaatagtatcaaaaacagaatatcctaaaccatataatatatattcaggaacactcaaactaaatgtccaggattctcctaaatacgtaaactttaatagtgcgaaatcattcaaaaatctaccacttatagatagatagtacataaatgcgtatagtagtctacctatctctttattatgaaaaccggcattacgatcatatatgtcgtgatatacctgtgatccgtttacgttaaaccataaatacatgggtgatcctataaacatgaatttatttctaattctcagagctatagttaattgaccgtgtaatatttgcttacatgcatacttgatacgcttattaataagatttttatcattgctcgttatttcagaatcgtatatataaggagtaccatcgtgattcttaccagatattatacaaaatactatatataaaatatattgaccaacgttagtaatcatataaatgtttaacgttttaaattttgtattcaatgatccattatcatacgctagcatggtcttatgatattcattctttaaaatataatattgtgttagccattgcattggggctcctaatggagattttttattctcatccattttaggataggctttcataaagtccctaataacttcgtgaataatgtttctatgttttctactgatgcatgtatttgcttcgatttttttatcccatgtttcatctatcatagatttaaacgcagtaatgctcgcaacattaacatcttgaaccgttggtacaattccgttccataaatttataatgttcgccatttatataactcattttttgaatatacttttaattaacaaaagagttaagttactcatatggacgccgtccagtctgaacatcaatctttttagccagagatatcatagccgctcttagagtttcagcgtgattttccaacctaaatagaacttcatcgttgcgtttacaacacttttctatttgttcaaactttgttgttacattagtaatctttttttccaaattagttagccgttgtttgagagtttcctcattgtcgtctccatcggctttaacaattgcttcgcgtttagcctctggctttttagcagcctttgtagaaaaaaattcagttgctggaattgcaagatcgtcatctccggggaaaagagttccgtccatttaaagtacagattttagaaactgacactctgcgttatttatatttggtacaacacatggattataaatattgatgttaataacatcagaaaatgtaaagtctatacattgttgcatcgtgttaaattttctaatggatctagtattattgggtccaacttctgcctgaaatccaaatatggaagcggatacaaaaccgtttcctggataaaccacacatctccacttttgctttacatcagaaattgtgtcgttgacatcttgaactctcctatctaatgccggtgttccacctatagattttgaatattcgaatgctgcatgagtagcattaaattccttaatattgccataattttcatatattgagtaaccctggataaaaagtaaacacaccgcagccgtcgctaccacaataaaaaaaattgatagagagttcatttataatctattagaagctgacaaaatttttttacacgcatcagacaatgctttaataaatagttcaacatctacttttgtcatatcgaaccgatggtatgattctaacctagaattacatccgaaaaagttgactatgttcatagtcattaagtcattaacaaacaacattccagactctggattataagacgatactgtttcgtcacaattacctaccttaatcatgtgattatgaatattggctattagagcaccttctaagaaatctataatatctttgaaacacgatttaaaatcaaaccacgaatatacttctacgaagaaagttagtttacccataggagaaataactataaatggagatctaaatacaaaatccggatctatgatagttttaacattattatattctctattaaatacctccacatctaaaaatgttaattttgaaactatgtcttcgtttattaccgtacctgaactaaacgctataagctctattgtttgagaactctttaaacgatattcttgaaatacatgtaacaaagtttcctttaactcggtcggtttatctaccatagttacagaatttgtatccttatctataatataataatcaaaatcgtataaagttatataattatcgcgttcagattgggatcttttcaaatagactaaaaaccccatttctctagtaagtatcttatgtatatgtttgtaaaatatcttcatggtgggaatatgctctaccgcagttagccattcctcattgacagcggtagatgtattagacaaaactattccaatgtttaacaagggccattttacgagattattaaatccttgtttgataaatgtagccaatgagggttcgagttcaacgacgattgaattctcttcccgcggatgctgcatgatgaacgacgggatgttgttcgattgatttggaattctttttcgactttttgtttatattaaatattttaaaatttatagcggatagcaattcatgtaccacggataatgtagacgcgtattgcgcatcgatatctttattattagataaatttatcaataaatgtgagaagtttgcctcgttaaggtcttccatttaaatattatataaacatttgtgtttgtaacttattcgtcttttatggaatagttttttactagtaaagctgcaattacacactttgtccgtaaaacataaatataaacaccagcttttatcaatcgttccaaaaagtcgacggcggacatttttaacatggcatctattttaaatacacttaggtttttggaaaaaacatcattttataattgtaacgattcaataactaaagaaaagattaagattaaacataagggaatgtcatttgtattttataagccaaagcattctaccgttgttaaatacttgtctggaggaggtatatatcatgatgatttggttgtattggggaaggtaacaattaataatctaaagatgatgctattttacatggatttatcatatcatggagtgacaagtagtggagcaatttacaaattgggatcgtctatcgatagactttctctaaataggactattgttacaaaagttaataattatgatgatacattttttgacgacgatgattgatcgctattgcacaattttgtttttgtactttctaatatagtgtttaggttctttttcatatgagaatattgatttactaaaatatctatgtttaacttttgttctatgacgtccttatcggcggtatcggtacatatacgtaattcaccttcacaaaatacggagtcttcgataataatagccaatcgattattggatctagctgtctgtatcatattcaacatgtttaatatatcctttcgtttcccctttacaggcatcgatcgtagcatattttccgcgtctgatatggaaatgttaaaactacaaaaatgcgtaatgttagcccgtcctaatattggtacgtgtctataagtttggcatagtagaataatagacgtgtttaaatgccttccaaagtttaagaattctattagagtattgcattttgatagtttatcgcctacatcatcaaaaataagtaaaaagtgtgctgattttttatgattttgtgcgacagcaatacatttttctatgttacttttagttcgtatcagattatattctagagattcctgactactaacgaaattaatatgatttggccaaatgtatccatcataatctgggttataaacgggtgtaaacaagaatatatgtttatattttttaactagtgtagaaaacagagatagtaaatagatagtttttccagatccagatcctcctgttaaaaccattctaaacggcatttttaataaattttctcttgaaaattgtttttcttggaaacaattcataattatatttacagttactaaattaatttgataataaatcaaaatatggaaaactaaggttgttagtagggaggagaacaaagaaggcacatcgtgatataaataacatttattatcatgatgacaccagaaaacgacgaagagcagacatctgtgttctccgctactgtttacggagacaaaattcagggaaagaataaacgcaaacgcgtgattggtctatgtattagaatatctatggttatttcactactatctatgattaccatgtccgcgtttctcatagtgcgcctaaatcaatgcatgtctgctaacgaggctgctattactgacgccgctgttgccgttgctgctgcatcatctactcatagaaaggttgcgtctagcactacgcaatatgatcacaaagaaagctgtaatggtttatattaccagggttcttgttatatattacattcagactaccagttattctcggatgctaaagcaaattgcactgcggaatcatcaacactacccaataaatccgatgtcttgactacctggctcattgattatgttgaggatacatggggatctgatggtaatccaattacaaaaactacatccgattatcaagattctgatgtatcacaagaagttagaaagtatttttgtgttaaaacaatgaactaatatttatttttgtacattaataaatgaaatcgcttaatagacaaactgtaagtaggtttaagaagttgtcggtgccggccgctataatgatgatactctcaaccattattagtggcataggaacatttctgcattacaaagaagaactgatgcctagtgcttgcgccaatggatggatacaatacgataaacattgttatttagatactaacattaaaatgtctacagataatgcggtttatcagtgtcgtaaattacgagctagattgcctagacctgatactagacatctgagagtattgtttagtattttttataaagattattgggtaagtttaaaaaagaccaatgataaatggttagatattaataatgataaagatatagatattagtaaattaacaaattttaaacaactaaacagtacgacggatgctgaagcgtgttatatatacaagtctggaaaactggttaaaacagtatgtaaaagtactcaatctgtactatgtgttaaaaaattctacaagtgacaacaaaaaatgaattaataataagtcgttaacgtacgccgccatggacgccgcgtttgttattactccaatgggtgtgttgactataacagatacattgtatgatgatctcgatatctcaatcatggactttataggaccatacattataggtaacataaaaactgtccaaatagatgtacgggatataaaatattccgacatgcaaaaatgctactttagctataagggtaaaatagttcctcaggattctaatgatttggctagattcaacatttatagcatttgtgccgcatacagatcaaaaaataccatcatcatagcatgcgactatgatatcatgttagatatagaagataaacatcagccattttatctattcccatctattgatgtttttaacgctacaatcatagaagcgtataacctgtatacagctggagattatcatctaatcatcaatccttcagataatctgaaaatgaaattgtcgtttaattcttcattctgcatatcagacggcaatggatggatcataattgatgggaaatgcaatagtaattttttatcataaaagttgtaaagtaaataataaaacaataaatattgaactagtagtacgtatattgagcaatcagaaatgatgctggtacctcttatcacggtgaccgtagttgcgggaacaatattagtatgttatatattatatatttgtaggaaaaagatacgtactgtctataatgacaataaaattatcatgacaaaattaaaaaagataaagagttctaattccagcaaatctagtaaatcaactgatagcgaatcagactgggaggatcactgtagtgctatggaacaaaacaatgacgtagataatatttctaggaatgagatattggacgatgatagcttcgctggtagtttaatatgggataacgaatccaatgttatggcgcctagcacagaacacatttacgatagtgttgctggaagcacgctgctaataaataatgatcgtaatgaacagactatttatcagaacactacagtagtaattaatgaaacggagactgttgaagtacttaatgaagataccaaacagaatcctaactattcatccaatcctttcgtaaattataataaaaccagtatttgtagcaagtcaaatccgtttattacagaacttaacaataaatttagtgagaataatccgtttagacgagcacatagcgatgattatcttaataagcaagaacaagatcatgaacacgatgatatagaatcatcggtcgtatcattggtgtgattagtttcctttttataaaattgaagtaatatttagtattattgctgccgtcacgttgtacaaatggagatattccctgtattcggcatttctaaaattagcaattttattgctaataatgactgtagatattatatagatacagaacatcaaaaaattatatctgatgagatcaatagacagatggatgaaacggtacttcttaccaacatcttaagcgtagaagttgtaaatgacaatgagatgtaccatcttattcctcatagattatcgacgattatactctgtattagttctgtcggaggatgtgttatctctatagataatgacgtcaatggcaaaaatattctaacctttcccattgatcatgctgtaatcatatccccactgagtaaatgtgtcgtagttagcaagggtcctacaaccatattggttgttaaagcggatatacctagcaaacgattggtaacatcgtttacaaacgacatactatatgtaaacaatctgtcactgattaattatttgccgttgtctgtattcattattagacgagtcaccgactatttggatagacacatatgcgatcagatatttgctaataataagtggtattcccttataaccatcgacgataagcaatatcctattccatcaaactgtataggtatgtcctctgccaagtacataaattctagcatcgagcaagatactttaatccatgtttgtaacctcgagcatccgttcgactcagtatacaaaaaaatgcagtcgtacaattctctacctatcaaggaacaaatattgtacggtagaattgataatataaatatgagcattagtatttctgtggattaatagatttctagtatggggatcattaatcatctctaatctctaaatacctcataaaacgaaaaaaaagctattatcaaatactgtacggaatggattcattctcttctctttttatgaaactctgttgtatatctactgataaaactggaagcaaaaaatctgatagaaagaataagaataagatcaaggattatatggaacacgattattataaaataacaatagttcctggttcctcttccacgtctactagctcgtggtattatacacatgcctagtaatagtctctttgcgttgacggaaagcagactagaaataacaggctaaaatgttcagacaccataatagttcccaacccagataataacagagttccatcaacacattcctttaaactcaatcccaaacccaaaaccgttaaaatgtatccggccaattgatagtagataatgaggtgtacagcgcatgataatttacacagtaaccaaaatgaaaacactttagtaattataagaaatatagacggtaatgtcatcatcaacaatccgataatatgcctgagagtaaacattgatggataaaacaaaaatgctccgcataactctatcatggcaataacacaaccaaacacttgtaaaattcctaaattagtagaaaatacaacgaatatcgatgtataagtgatctcgagaaataataagaataaagtaatgcccgtaaagataaacatcaacattgtttggtaatcattaaaccaattagtatgaagttgaactaatttcacagtagattttattccagtgttatcctcgcatgtataagtacctggtaagatatctttatattccataatcaatgagacatcactatctgataacgaatgaagtctagcactagtatgccatttacttaatattgtcgtcttggaagttttattataagttaaaatatcatggttatccaatttccatctaatatactttgtcggattatctatagtacacggaataatgatggtatcattacatgctgtatactctatggtctttgtagttgttataacaaccaacgtatagaggtatatcaacgatattctaactcttgacattttttatttatttaaaatgatacctttgttatttattttattctattttgctaacggtattgaatggcataagtttgaaacgagtgaagaaataatttctacttacttattagacgacgtattatacacgggtgttaatggggcggtatacacattttcaaataataaactaaacaaaactggtttaactaataataattatataacaacatctataaaagtagaggatgcggataaggatacattagtatgcggaaccaataacggaaatcccaaatgttggaaaatagacggttcagacgacccaaaacatagaggtagaggatacgctccttatcaaaatagcaaagtaacgataatcagtcacaacggatgtgtactatctgacataaacatatcaaaagaaggaattaaacgatggagaagatttgacggaccatgtggttatgatttattcacggcggataacgtaattccaaaagatggtttacgaggagcattcgtcgataaagacggtacttatgacaaagtttacattcttttcactgatactatcggctcaaagagaattgtcaaaattccgtatatagcacaaatgtgcctaaacgacgaaggtggtccatcatcattgtctagtcatagatggtcgacgtttctcaaagtcgaattagaatgtgatatcgacggaagaagttatagacaaattattcattctagaactataaaaacagataatgatacgatactatatgtattcttcgatagtccttattccaagtccgcattatgtacctattctatgaataccattaaacaatctttttctacgtcaaaattggaaggatatacaaagcaattgccgtctccagctcctggtatatgtttaccagctggaaaagttgttccacataccacgtttgaagtcatagaacaatataatgtactagatgatattataaagcctttatctaaccaacctatcttcgaaggaccgtctggtgttaaatggttcgatataaaggagaaggaaaatgaacatcgggaatatagaatatacttcataaaagaaaattctatatattcgttcgatacaaaatctaaacaaactcgtagctcgcaagtcgatgcgcgactattttcagtaatggtaactgcgaaaccgttatttatagcagatatagggataggagtaggaatgccacaaatgaaaaaaatacttaaaatgtaatcttaatcgagtacaccacacgacaatgaacaaacataagacagattatgctggttatgcttgctgcgtaatatgcggtctaattgtcggaattatttttacagcgacactattaaaagttgtagaacgtaaattagttcatacaccattaatagataaaacgataaaagatgcatatattagagaagattgtcctactgactggataagctataataataaatgtatccatttatctactgatcgaaaaacctgggaggaaggacgtaatgcatgcaaagctctaaattcaaattcggatctaattaagatagagactccaaacgagttaagttttttaagaagccttagacgaggctattgggtaggagaatccgaaatattaaaccagacaaccccatataattttatagctaagaatgccacgaagaatggaactaaaaaacggaaatatatttgtagcacaacgaatactcccaaactgcattcgtgttacactatataacaattacactacatttttatcataccactacttcggttagatgttttagaaaaaaataaatatcgccgtaccgttcttgtttttataaaaataacaattaacaattatcaaattttttctttaatattttacgtggttgaccattcttggtggtaaaataatctcttagtgttggaatggaatgctgtttaatgtttccacactcatcgtatattttgacgtatgtagtcacatcgtttacgcaatagtcagactgtagttctatcatgcttcctacatcagaaggaggaacagttttaaagtctcttggttttaatctattaccgttagttttcatgaaatcctttgttttatccacttcacattttaaataaatgtccactatacattcttttgttaattttactagatcgtcatgggtcatagaatttataggttccgtagtccatggatccaaactagcaaacttcgcgtatacggtatcgcgattagtgtatacaccaactgtatgaaaattaagaaaacagtttaataaatcaacagaaatatttaatcctccgtttgatacagatgcgccatatttatggatttcggattcacacgttgtttgtctgaggtgttcgtctagtgttgcttctacgtaaacttcgattcccatatattctttattgtcagaatcgcataccgatttatcatcatacactgtttgaaaactaaatggtatacacatcaaaataataaataataacgagtacattctgcaatattgttatcgtaattggaaaaatagtgttcgagtgagttggattatgtgagtattggattgtatattttattttatattttgtaataagaataaaatgctaatgtcaagtttattccaatagatgtcttattaaaaacatatataataaataacaatggctgaatggcataaaattatcgaggatatctcaaaaaataataagttcgaggatgccgccatcgttgattacaagactacaaagaatgttctagctgctattcctaacagaacatttgccaagattaatccgggtgaaattattcctctcatcactaatcgtaatattctaaaacctcttattggtcagaaatattgtattgtatatactaactctctaatggatgagaacacgtatgctatggagttgcttactgggtacgcccctgtatctccgatcgttatagcgagaactcataccgcacttatatttttgatgggtaagccaacaacatccagacgtgacgtgtatagaacgtgtagagatcacgctacccgtgtacgtgcaactggtaattaaaataaaaagtaatattcatatgtagtgtcaattttaaatgatgatgatgaaatggataatatccatattgacgatgtcaataatgccggtattggcatacagttcatcgatttttagatttcattcagaggatgtggaattatgttatgggcatttgtattttgataggatctataatgtagtaaatataaaatataatccgcatattccatatagatataattttattaatcgcacgttaaccgtagatgaactagacgataatgtcttttttacacatggttattttttaaaacacaaatatggttcacttaatcctagtttgattgtctcattatcaggaaacttaaaatataatgatatacaatgctcagtaaatgtatcgtgtctcattaaaaatttggcaacgagtacatctactatattaacatctaaacataagacttattctctacatcggtccacgtgtattactataataggatacgattctattatatggtataaagatataaatgacaagtataatgacatctatgattttactgcaatatgtatgctaatagcgtctacattgatagtgaccatatacgtgtttaaaaaaataaaaatgaactcttaattatgctatgctattagaaatggataaaatcaaaattacggttgattcaaaaattggtaatgttgttaccatatcgtataacttggaaaagataactattgatgtcacacctaaaaagaaaaaagaaaaggatgtattattagcgcaatcagttgctgtcgaagaggcaaaagatgtcaaggtagaagaaaaaaatattatcgatattgaagatgacgatgatatggatgtagaaagcgcgtaatacgatctataaaaataagtatataaatactttttatttactgtactcttactgtgtagtggtgataccctactcgattatttttttaaaaaaaaaatacttattctgattcttctagccatttccgtgttcgtttgaatgccacatcgacgtcaaagataggggagtagttgaaatctagttctgcattgttggtacgcacctcaaatgtagtgttggatatcttcaacgtatagttgttgagtagtgatggttttctaaatagaattctcttcatatcattcttgcacgcgtacatttttagcatccatcttggaatcctagatccttgttctattcccaatggtttcatcaatagaagattaaacatatcgtacgaacacgatggagagtaatcgtagcaaaagtaagcatttcctttaatctcagatcccggatactggatatattttgcagccaacacgtgcatccatgcaacatttcctacatatacccggctatgcaccgcgtcatcatcgactgtacgatacataatgttaccgtgttgcttacattgctcgtaaaagactttcatcaatttgtctccttctccgtaaattccagtgggtcttaggcaacaagtatacaattttgctccattcatgattacggaattattggctttcataaccagttgctcggccatacgtttactttttgcgtatacatgtcctggtgatatatcataaagggtatgctcatggccgatgaatggatcaccgtgtttattgggtcctattgcttccatgctactagtatagatcaaatacttgattcctaggtccacacaagctgccaaaatagtctgtgttccataatagtttactttcatgatttcattatcggtgtattttccaaatacatccactagagcagccgtatgaataatcagatttaccccatctagcgcttctctcaccttatcaaagtcgtttatatcacattgtatatagtttataaccttaactttcgaggttattggttgtggatcttctacaatatctatgactctgatttcttgaacatcatctgcactaattaacagttttactatatacctgcctagaaatccggcaccaccagtaaccgcgtacacggccattgctgccactcataatatcagactacttattctattttactaaataatggctgtttgtataatagaccacgataatatcagaggagttatttactttgaaccagtccatggaaaagataaagttttaggatcagttattggattaaaatccggaacgtatagtttgataattcatcgttacggagatattagtcaaggatgtgattccataggcagtccagaaatatttatcggtaacatctttgtaaacagatatggtgtagcatatgtttatttagatacagatgtaaatatatttacaattattggaaaggcgttatctatttcaaaaaatgatcagagattagcgtgtggagttattggtatttcttacataaatgaaaagataatacattttcttacaattaacgagaatggcgtttgatatatcagttaatgcgtctaaaacaataaatgcattagtttacttttctactcagcaaaataaattagtcatacgtaatgaagttaatgatacacactacactgtcgaatttgatagggacaaagtagttgacacgtttatttcatataatagacataatgacaccatagaaataagaggggtgcttccagaggaaactaatattggttgcgcggttaatacgccggttagtatgacttacttgtataataagtatagttttaaactgattttagcagaatatataagacacagaaatactatatccggcaatatttattcggcattgatgacactagatgatttggctattaaacagtatggagacattgatctattatttaatgagaaacttaaagtagactccgattcgggactatttgactttgtcaactttgtaaaggatatgatatgttgtgattctagaatagtagtagctctatctagtctagtatctaaacattgggaattgacaaataaaaaatataggtgtatggcattagccgaacatatatctgatagtattccaatatctgagctatctagactacgatacaatctatgtaagtatctacgcgggcacactgagagcatagaggatgaatttgattattttgaagacgatgattcgtctacatgttctgccgtaaccgacagggaaacggatgtataatttttttttatagcgtgaaggatatgataaaaaatataattgttgtatttatcccattccaatcaccttatatgattctgtaacacaataaaggagtcttatagatgtatagaggtcagatactggtttgataaactgtttattccacataagtatgtttgactttatggttagacccgcatactttaacaaatcactgaaaattggagttaggtattgacctctcagaatcagttgccgttctggaacattaaatgtattttttatgatatactccaacgcatttatgtgggcatacaacaagtcattactaatggagtattccaagagttttagttgtctagtatttaacaagagaagagatttcaacagactgtttatgaactcgaatgccgcctcattgtcgcttatattgatgatgtcgaattctcccaatatcatcaccgatgagtagctcatcttgttatcgggatccaagttttctaaagatgtcattaaaccctcgatcatgaatggatttatcatcatcgtttttatgttggacatgagcttagtccgtttgtccacatctatagacgacgatttctgaattatttcatatatccctctctttaactccaggaacttgtcaggatggtctactttaatatgttctcgtctaagagatgaaaatctttggatggttgtacgcgacttttctctaaaggatgacgttgcccaagatcctctcttaaatgaatccatcttatccttggacaagatggacagtctattttccttagatggtttaatatttttgttacccatgatctataaaggtagacctaatcgtctcggatgacctatatatttattttcagttttattatacgcataaattgtaaaaaatatgttaggtttacaaaaatgtctcgtggggcattaatcgtttttgaaggattggacaaatctggaaaaacaacacaatgtatgaacatcatggaatctataccggcaaacacgataaaatatcttaactttcctcagagatccactgtcactggaaagatgatagatgactatctaactcgtaaaaaaacctataatgatcatatagttaatctattattttgtgcaaatagatgggagtttgcatcttttatacaagaacaactagaacagggaattactttaatagttgatagatacgcattttctggagtagcgtatgccgccgctaaaggcgcgtcaatgactctcagtaagagttatgaatctggattgcctaaacccgacttagttatattcttggaatctggtagcaaagaaattaatagaaacgtcggcgaggaaatttatgaagatgttacattccaacaaaaggtattacaagaatataaaaaaatgattgaagaaggagatattcattggcaaattatttcttctgaattcgaggaagatgtaaagaaggagttgattaagaatatagttatagaggctatacacacggttactggaccagtggggcaactgtggatgtaatagtgaaattacattttttataaatagatgttagtacagtgttataaatggatgaagcatattactctggcaacttggaatcagtactcggatacgtgtccgatatgcataccgaactcgcatcaatatctcaattagttattgccaagatagaaactatagataatgatatattaaacaaggacattgtaaattttatcatgtgtagatcaaacttggataatccatttatctctttcctagatactgtatatactattatagatcaagagaactatcagactgagttgattaattcattagacgacaatgaaattatcgattgtatagttaataagtttatgagcttttataaggataacctagaaaatatagtagatgctatcattactctaaaatatataatgaataatccagattttaaaactacgtatgcagaagtactcggttccagaatagccgatatagatattaaacaagtgatacgtaagaatatactacaattgtctaatgatatccgcgaacgatatttgtgaaaatattaaaaaaaaatactttttttattaaatgacgtcgcttcgcgaatttagaaaattatgctgtgatatatatcacgcatcaggatataaagaaaaatctaaattaattagagactttataacagatagggatgataaatatttgatcattaagctattgcttcccggattagacgatagaatttataacatgaacgataaacaaattataaaattatatagtataatatttaaacaatctcaggaagatatgctacaagatttaggatacggatatataggagacactattaggactttcttcaaagagaacacagaaatccgtccacgagataaaagcattttaactttagaagaagtggatagttttttaactacgttatcatccgtaactaaagaatcgcatcaaataaaattattgactgatatcgcatccgtttgtacatgtaatgatttaaaatgtgtagtcatgcttattgataaagatctaaaaattaaagcgggtcctcggtacgtacttaacgctattagtcctaatgcctatgatgtgtttagaaaatctaataacttgaaagagataatagaaaatgcatctaaacaaaatctagactctatatctatttctgttatgactccaattaatcccatgttagcggaatcgtgtgattctgtcaataaggcgtttaaaaaatttccatcaggaatgtttgcggaagtcaaatacgatggtgaaagagtacaagttcataaaaataataacgagtttgccttctttagtagaaacatgaaaccagtactctctcataaagtggattatctcaaagaatacataccgaaagcatttaaaaaagctacgtctatcgtattggattctgaaattgttcttgtagacgaacataatgtaccgctcccgtttggaagtttaggaatacacaaaaagaaagaatataaaaactctaacatgtgtttgttcgtgtttgactgtttgtactttgatggattcgatatgacggacattccattgtacgaacgaagatcttttctcaaagatgttatggttgaaatacccaatagaatagtattctcagagttgacgaatattagtaacgagtctcagttaactgacgtattggatgatgcactaacgagaaaattagaaggattggtcttaaaagatattaatggagtatacgaaccgggaaagagaagatggttaaaaataaagcgagactatttgaacgagggttccatggcagattctgccgatttagtagtactaggtgcttactatggtaaaggagcaaagggtggtatcatggcagtctttctaatgggttgttacgacgatgaatccggtaaatggaagacggttaccaagtgttcaggacacgatgataatacgttaagggagttgcaagaccaattaaagatgattaaaattaacaaggatcccaaaaaaattccagagtggttagtagttaataaaatctatattcccgattttgtagtagaggatccgaaacaatctcagatatgggaaatttcaggagcagagtttacatcttccaagtcccataccgcaaatggaatatccattagatttcctagatttactaggataagagaggataaaacgtggaaagaatctactcatctaaacgatttagtaaacttgactaaatcttaatagttacatacaaactgaaaattaaaataacactatttagttggtggtcgccatggatggtgttattgtatactgtctaaacgcgctagtaaaacatggcgaggaaataaatcatataaaaaatgatttcatgattaaaccatgttgtgaaagagtttgtgaaaaagtcaagaacgttcacattggcggacaatctaaaaacaatacagtgattgcagatttgccatatctggataatgcggtatccgatgtatgcaattcactgtataaaaagaatgtatcaagaatatccagatttgctaatttgataaagatagatgacgatgacaagactcctactggtgtatataattattttaaacctaaagatgccattcctgttattatatccataggaaaggatagagatgtttgtgaactattaatctcatcagacatatcgtgtgcatgcgtggagttaaattcatatcacgtagccattcttcccatggatgtttccttttttaccaaaggaaatgcatcattgattattctcctgtttgatttctctatcgatgcggcacctctcttaagaagtgtaaccgataataatgttattatatctagacaccagcgtatacatgacgagcttccgagttccaattggttcaagttttacataagtataaagtccgactattgttctatattatatatggttgttgatggatctgtgatgcatgcgatagctgataatagaactcacgcaattattagcaaaaatatattagacaatactacgattaacgatgagtgtagatgctgttattttgaaccacagattaggattcttgatagagatgagatgctcaatggatcatcgtgtgatatgaacagacattgtattatgatgaatttacctgatgtaggcgaatttggatctagtatgttggggaaatatgaacctgacatgattaagattgctctttcggtggctggtaatttaataagaaatcgagactacattcccgggagacgaggatatagctactacgtttacggtatagcctctagataatttttttaagcacgaaataaaaaacataattttaaaccaatctatttcatactattttgtgtgatcaccatggacataaagatagatattagtatttctggtgataaatttacggtgactactaggagggaaaatgaagaaagaaaaaaatatctacctctccaaaaagaaaaaactactgatgttatcaaacctgattatcttgagtacgatgacttgttagatagagatgagatgtttactattctagaggaatattttatgtacagaggtctattaggcctcagaataaaatatggacgactctttaacgaaattagaaaattcgacaatgatgcggaagaacaattcggtactatagaagaactcaagcagaaacttagattaaattctgaagagggagcagataactttatagattatataaaggtacaaaaacaggatatcgtcaaacttactgtatacgattgcatatctatgataggattgtgtgcatgcgtggtagatgtttggagaaatgagaaactgttttctagatggaaatattgtttacgagcgattaaactgtttattgatgatcacatgcttgataagataaaatctatactgcagaatagactagtatatgtggaaatgtcatagaaagttaaaagttaatgagagcaaaaatatataaggttgtattccatatttgttatttttttctgtaatagttagaaaaatacattcgatggtctatctatcagattattatgtgttataaggtactttttctcataataaactagagtatgagtaagatagtgtttttcaaaacatataaatctaaaattgatggatgagatatacagctattaatttcgaaaatatattttaatctgataactttaaacatggatttttgatggtggtttaacgttttaaaaaaagattttgttattgtagtatatgataatattaaaagatggatataaagaatttgctgactgcatgtactattttttacattactacattggctacggcagatatacctacttcgtcactgccacacgctccggtaaacggggcatgtgacgagggagaatatcttgataagaggcataatcaatgttgtaatcagtgtccacctggagaatttgccaaggtcagatgtagtggtagtgataacacaaaatgtgaacgctgcccacctcatacatataccgcaatccccaattactctaatggatgtcatcaatgtagaaaatgcccaacaggatcatttgataaggtaaagtgtaccggaacacagaacagtaaatgttcgtgtcttcctggttggtattgcgctactgattcttcacagactgaagattgtcgagattgtataccaaaaaggagatgtccatgcggatactttggtggaatagatgaacaaggaaatcctatttgtaaatcgtgttgtgttggtgaatattgcgactacctacgtaattatagacttgatccatttcctccatgcaaactatctaaatgtaattaattatgattttgatgataatgttaccatacattatatcgctacttggttagtgtattattcagtatgaagacctattaataattacttatcttttgacgatcttgttataattataatataaaaatacttatggcatagtaactcataattgctgacgcgataaattcgtaataatctgttttgttcaaaggaatctacaggcataaaaataaaaatataatttataatatactcttacagcgcgccatcatgaataacagcagtaaattaattgctgttattaatggatttagaaatagtggacgattttgtgatattaatatagttattaatgatgaaaggataaacgctcacagactcatcctatctggagcctccgaatatttttccattctgttttccaataattttatcgattctaatgaatacgaagttaatctaagtcatttagattatcaaagcgtaaacgatttgatcgattacatttatgggatacctttgagcctaactaacgataacgtgaaatatattctttcaaccgctgattttttacaaattggatctgctattacggagtgtgaaaattacatacttaaaaatctttgttctagaaactgtatcgatttctacatatacgctgataaatataataacaagaaaatagaatcagcgtcgtttaacacaatattacaaaatattttgagactcatcaacgatgaaaactttaaatacttaacagaggaatcaatgataaaaattttaagcgatgatatgttaaatataaaaaatgaggatttcgccccactaattctcattaaatggttagagagtactcaacaaccatgcaccgtcgagttacttaaatgcctcagaatatcattgctttccccacaagttataaaatcactttatagtcatcgactggttagttcaatctacgaatgtataacattcttaaacaatatagcattcttggatgaatcatttcctagataccatagcatcgagttgatatctatcggtataagtaattcgcatgataagatttccataaactgctacaatcataaaaaaaatacatgggaaatgatatcttcacgtagatataggtgtagtttcgcagtggccgtcctggataatattatttatatgatgggtggatatgatcagtccccgtatagaagttcaaaggttatagcgtacaatacatgtacaaattcttggatatatgatataccagagctaaaatatcctcgttctaattgtgggggactggctgatgacgaatacatttattgtataggcggcatacgcgatcaggattcatcgttgacatctagtattgatagatggaagccatcaaaaccatattggcagaagtatgctaaaatgcgcgaaccaaaatgtgatatgggggttgcgatgttaaacggattaatatatgttataggtggaatcgttaaaggtgacacgtgtaccgacgcactagagagtttatcagaagatggatggatgaagcatcaacgtcttccaataaaaatgtccaatatgtcgacgattgttcatgatggcaagatttatatatctggaggttacaacaatagtagtgtagttaatgtaatatcgaatttagtccttagctataattcgatatatgatgaatggaccaaattatcatcattaaacattcctagaattaatcccgctctatggtcagcgcataataaattatatgtaggaggaggaatatctgatgatgttcgaactaatacatctgaaacatacgacaaagaaaaagattgttggacattggataatggtcacgtgttaccacgcaattatataatgtataaatgcgaaccgattaaacataaatatccattggaaaaaacacagtacacgaatgattttctaaagtatttggaaagttttataggtagttgatagaacaaaatacataattttgtaaaaataaatcactttttatactaatatgacacgattaccaatacttttgttactaatatcattagtatacgctacaccttttcctcagacatctaaaaaaataggtgatgatgcaactctatcatgtaatcgaaataatacaaatgactacgttgttatgagtgcttggtataaggagcccaattccattattcttttagctgctaaaagcgacgtcttgtattttgataattataccaaggataaaatatcttacgactctccatacgatgatctagttacaactatcacaattaaatcattgactgctagagatgccggtacttatgtatgtgcattctttatgacatcgcctacaaatgacactgataaagtagattatgaagaatactccacagagttgattgtaaatacagatagtgaatcgactatagacataatactatctggatctacacattcaccggaaactagttctgagaaacctgattatatagataattctaattgctcgtcggtattcgaaatcgcgactccggaaccaattactgataatgtagaagatcatacagacaccgtcacatacactagtgatagcattaatacagtaagtgcatcatctggagaatccacaacagacgagactccggaaccaattactgataaagaagatcatacagttacagacactgtctcatacactacagtaagtacatcatctggaattgtcactactaaatcaaccaccgatgatacgtacaatgataatgatacagtaccaccaactactgtaggcggtagtacaacctctattagcaattataaaaccaaggactttgtagaaatatttggtattaccgcattaattatattgtcggccgtggcaatattctgtattacgtattatatatgtaataaacgttcacgtaaatacaaaacagagaacaaagtctagatttttgacttacataaatgtctgggatagtaaaatctatcatattgagcgggccatctggtttaggaaagacagccatagccaaaagactatgggaatatatttggatttgtggtgtcccataccactagatttcctcgtcctatggaacgagaaggtgtcgattaccattacgttaacagagaggccatctggaagggaatagccgccggaaactttctagaacatactgagtttttaggaaatatttacggaacttctaaaactgctgtgaatacagcggctattaataatcgtatttgtgtgatggatctaaacatcgatggcgttagaagtcttaaaaatacgtacctaatgccttactcggtgtatataagacctacctctcttaaaatggttgagaccaagcttcgttgtagaaacactgaagcggatgatgagattcatcgtcgtgtgatgttggcaaaaactgacatggatgaggcaggtgaagccggtctattcgacactattatcattgaagatgatgtgaatttagcatatagtaagttaattcagatactacaggaccgtattagaatgtattttaacactaattagagacttaagacttaaaacttgataattaataatataactcgtttttatatgtggctatttcaacgtctaatgtattagttaaatattaaaacttaccacgtaaaacttaaaatttaaaatgatatttcattgacagatagatcacacattatgaactttcaaggacttgtgttaactgacaattgcaaaaatcaatgggtcgttggaccattaataggaaaaggtggatttggtagtatttatactactaatgacaataattatgtagtaaaaatagagcccaaagctaacggatcattatttaccgaacaggcattttatactagagtacttaaaccatccgttatcgaagaatggaaaaaatctcacaatataaagcacgtaggtcttatcacgtgcaaggcatttggtctatacaaatccattaatgtggaatatcgattcttggtaattaatagattaggtgcagatctagatgcggtgatcagagccaataataatagattaccaaaaaggtcggtgatgttgatcggaatcgaaatcttaaataccatacaatttatgcacgagcaaggatattctcacggagatattaaagcgagtaatatagtcttggatcaaatagataagaataaattatatctagtggattacggattggtttctaaattcatgtctaatggcgaacatgttccatttataagaaatccaaataaaatggataacggtactctagaatttacacctatagattcgcataaaggatacgttgtatctagacgtggagatctagaaacacttggatattgtatgattagatggttgggaggtatcttgccatggactaagatatctgaaacaaagaattgtgcattagtaagtgccacaaaacagaaatatgttaacaatactgcgactttgttaatgaccagtttgcaatatgcacctagagaattgctgcaatatattaccatggtaaactctttgacatattttgaggaacccaattacgacaagtttcggcacatattaatgcagggtgtatattattaagtgtggtgtttggtcgataaaaattaaaaaataacttaatttattattgatctcgtgtgtacaaccgaaatcatggcgatgttttacgcacacgctctcggtgggtacgacgagaatcttcatgcctttcctggaatatcatcgactgttgccaatgatgtcaggaaatattctgttgtgttagtttataataacaagtatgacattgtaaaagacaaatatatgtggtgttacagtcaggtgaacaagagatatattggagcactgctgcctatgtttgagtgcaatgaatatctacaaattggagatccgatccatgatcaagaaggaaatcaaatctctatcatcacatatcgccacaaaaactactatgctctaagcggaatcgggtacgagagtctagacttgtgtttggaaggagtagggattcatcatcacgtacttgaaacaggaaacgctgtatatggaaaagttcaacatgattattctactatcaaagagaaggccaaagaaatgagtacacttagtccaggacctatcatcgattaccacgtctggataggagattgtatctgtcaagttactgctgtggacgtacatggaaaggaaattatgaaaatgagattcaaaaagggtgcggtgcttccgatcccaaatctggtaaaagttaaacttggggagaatgatacagaaaatctttcttctactatatcggcgacaccatcgaggtaaccacctctctggaagacagcgtgaataatgtactcatgaaacgtttggaaactatacgccatatgtggtctgttgtatatgatcattttgatattgtgaatggtaaagaatgctgttatgtgcatacgcatttgtctaatcaaaatcttataccgagtactgtaaaaacaaatttgtacatgaagactatgggatcatgcattcaaatggattccatggaagctctagagtatcttagcgaactgaaggaatcaggtggatggagtcccagaccagaaatgcaggaatttgaatatccagatggagtggaagacactgaatcaattgagagattggtagaggagttcttcaatagatcagaacttcaggctggtgaatcagtcaaatttggtaattctattaatgttaaacatacatctgtttcagctaagcaactaagaacacgtatacggcagcagcttccttctatactctcatcttttaccaacacaaagggtggatatttgttcattggagttgataataatacacacaaagtatttggattcacggtgggttacgactacctcagactgatagagaatgatatagaaaagcatatcaaaagactttgtgttgtgtatttctgtgagaagaaagaggacatcaagtacgcgtgtcgattcatcaaggtatataaacctggggatgaggctacctcgacatacgtgtgcgctatcaaagtggaaagatgctgttgtgctgtgtttgcagattggccagaatcatggtatatggatactaatggtatcaagaagtattctccagatgaatgggtgtcacatataaaattttaattaatgtaatagagaacaaataataaggttgtaatatcatatagacaataactaacaattaattagtaactgttatctcttttttaactaaccaactaactatatacctattaatacatcgtaattatagttcttaacatctattaatcattgattcgcttctttaattttttataaactaacattgttaattgaaaagggataacatgttacagaatataaattatatatggatttttttaaaaaggaaatacttgactggagtatatatttatctcttcattatatagcacgcgtgttttccaatttttccacatcccatataatacaggattataatctcgttcgaacatacgagaaagtggataaaacaatagttgattttttatctaggttgccaaatttattccatattttagaatatggggaaaatattctacatatttattctatggatgatgctaatacgaatattataattttttttctagatagagtattaaatattaataagaacgggtcatttatacacaatctcgggttatcatcatccattaatataaaagaatatgtatatcaattagttaataatgatcatccagataataggataagactaatgcttgaaaatggacgtagaacaagacattttttgtcctatatatcagatacagttaatatctatatatgtattttaataaatcatggattttatatagatgccgaagacagttacggttgtacattattacatagatgtatatatcactataagaaatcagaatcagaatcatacaatgaattaattaagatattgttaaataatggatcagatgtagataaaaaagatacgtacggaaacacaccttttatcctattatgtaaacacgatatcaacaacgtggaattgtttgagatatgtttagagaatgctaatatagactctgtagactttaatagatatacacctcttcattatgtctcatgtcgtaataaatatgattttgtaaagttattaatttctaaaggagcaaatgttaatgcgcgtaataaattcggaactactccattttattgtggaattatacacggtatctcgcttataaaactatatttggaatcagacacagagttagaaatagataatgaacatatagttcgtcatttaataatttttgatgctgttgaatctttagattatctattatccagaggagttattgatattaactatcgtactatatacaacgaaacatctatttacgacgctgtcagttataatgcgtataatacgttggtctatctattaaacaaaaatggtgattttgagacgattactactagtggatgtacatgtatttcggaagcagtcgcaaacaacaacaaaataataatggaagtactattgtctaaacgaccatctttgaaaattatgatacagtctatgatagcaattactaaacataaacagcataatgcagatttattgaaaatgtgtataaaatatactgcgtgtatgaccgattatgatactcttatagatgtacagtcgctacagcaatataaatggtatattttaagatgtttcgatgaaatagatatcatgaagagatgttatataaaaaataaaactgtattccaattagttttttgtatcaaagacattaatactttaatgagatacggtaaacatccttctttcgtgaaatgcactagtctcgacgtatacggaagtcgtgtacgtaatatcatagcatctattagatatcgtcagagattaattagtctattatccaagaagctggatcctggagataaatggtcgtgttttcctaacgaaataaaatataaaatattggaaaactttaacgataacgaactatccacatatctaaaaatcttataaacattattaaaatataaaatctaagtaggataaaatcacactacatcattgtttccttttagtgctcgacagtgtatactatttttaacgctcataaataaaaatgaaaacgatttccgttgttacgttgttatgcgtactacctgctgttgtttattcaacatgtactgtacccactatgaataacgctaaattaacgtctaccgaaacatcgtttaatgataaccagaaagttacgtttacatgtgatcagggatatcattctttggatccaaatgctgtctgtgaaacagataaatggaaatacgaaaatccatgcaaaaaaatgtgcacagtttctgattatgtctctgaactatataataaaccgctatacgaagtgaattccaccatgacactaagttgcaacggcgaaacaaaatattttcgttgcgaagaaaaaaatggaaatacttcttggaatgatactgttacgtgtcctaatgcggaatgtcaacctcttcaattagaacacggatcgtgtcaaccagttaaagaaaaatactcatttggggaatatatgactatcaactgtgatgttggatatgaggttattggtgcttcgtacataagttgtacagctaattcttggaatgttattccatcatgtcaacaaaaatgtgatatgccgtctctatctaacggattaatttccggatctacattttctatcggtggcgttatacatcttagttgtaaaagtggttttacactaacggggtctccatcatccacatgtatcgacggtaaatggaatcccatactcccaatatgtgtacgaactaacgaaaaatttgatccagtggatgatggtcccgacgatgagacagatttgagcaaactctcgaaagacgttgtacaatatgaacaagaaatagaatcgttagaagcaacttatcatataatcatagtggcgttgacaattatgggcgtcatatttttaatctccgttatagtattagtttgttcctgtgacaaaaataatgaccaatataagttccataaattgctaccgtaaatataaatccgttaaaataattaataatttaataacaaacaagtatcaaaagattaaagacttatagctagaatcaattgagatgtcttcttcagtggatgttgatatctacgatgccgttagagcatttttactcaggcactattataacaagagatttattgtgtatggaagaagtaacgccatattacataatatatacaggctatttacaagatgcgccgttataccgttcgatgatatagtacgtactatgccaaatgaatcacgtgttaaacaatgggtgatggatacacttaatggtataatgatgaatgaacgcgatattactgtaagcgttggcaccggaatactattcatggaaatgtttttcgattacaataaaaatagtatcaacaatcaactaatgtatgatataattaatagcgtatctataattctagctaatgagagatatagaagcgcttttaacgacgatggtatatacatccgtagaaatatgattaacaagttgtacggatacgcatctctaactactattggcacgatcgctggaggtgtttgttattatctgttgatgcatctagttagtttgtataaataattatttcaatatactagttaaaattttaagattttaaatgtataaaaaactaataacgtttttatttgtaataggtgcattagcatcctattcgaataatgagtacactccgtttaataaactgagtgtaaaactctatatagatggagtagataatatagaaaattcatatactgatgataataatgaattggtgttaaattttaaagagtacacaatttctattattacagagtcatgcgacgtcggatttgattccatagatatagatgttataaacgactataaaattattgatatgtataccattgactcgtctactattcaacgcagaggtcacacgtgtagaatatctaccaaattatcatgccattatgataagtacccttatattcacaaatatgatggtgatgagcgacaatattctattactgcagagggaaaatgctataaaggaataaaatatgaaataagtatgatcaacgatgatactctattgagaaaacatactcttaaaattggatctacttatatatttgatcgtcatggacatagtaatacatattattcaaaatatgatttttaaaaatttaaaatatattatcacttcagtgacagtagtcaaataacaaacaacaccatgagatatattataattctcgcagttttgttcattaatagtatacatgctaaaataactagttataagtttgaatccgtcaattttgattccaaaattgaatggactggggatggtctatacaatatatcccttaaaaattatggcatcaagacgtggcaaacaatgtatacaaatgtaccagaaggaacatacgacatatccgcatttccaaagaatgatttcgtatctttctgggttaaatttgaacaaggcgattataaagtggaagagtattgtacgggactatgcgtcgaagtaaaaattggaccaccgactgtaacattgactgaatacgacgaccatatcaatttgtacatcgagcatccgtatgctactagaggtagcaaaaagattcctatttacaaacgcggtgacatgtgtgatatctacttgttgtatacggctaacttcacattcggagattctaaagaaccagtaccatatgatatcgatgactacgattgcacgtctacaggttgcagcatagactttgtcacaacagaaaaagtgtgcgtgacagcacagggagccacagaagggtttctcgaaaaaattactccatggagttcgaaagtatgtctgacacctaaaaagagtgtatatacatgcgcaattagatccaaagaagatgttcccaatttcaaggacaaaatggccagagttatcaagagaaaatttaatacacagtctcaatcttatttaactaaatttctcggtagcacatcaaatgatgttaccacttttcttagcatgcttaacttgactaaatattcataactaatttttattaatgatacaaaaacgaaataaaactgcatattatacactggttaacgcccttataggctctaaccattttcaagatgaggtccctgattatagtccttctgttcccctctatcatctactccatgtctattagacgatgtgagaagactgaagaggaaacatggggattgaaaatagggttgtgtataattgccaaagatttctatcccgaaagaactgattgcagtgttcatctcccaactgcaagtgaaggattgataactgaaggcaatggattcagggatatacgaaacaccgataaattataaaaaaagcaatgtgtccgctgtttccgttaataatactattttcgtaactggcggattattcataaataactctaatagcacgatcgtggttaacaatatggaaaaacttgacatttataaagacaaacaatggtcgattatagaaatgcctatggctagggtatatcacggcatcgactcgacatttggaatgttatattttgccggaggtctatccgttaccgaacaatatggtaatttagagaaaaacaacgagatatcttgttacaatcctagaacgaataagtggtttgatatttcatatactatttataagatatccatatcatcattgtgtaaactaaataacgtcttctatgtatttagtaaggacattggatatgtggaaaagtatgatggtgcatggaagttagtacatgatcgtctccccgctataaaggcattatcaacttctccttattgattgaaaatgaaaatataaatagtttttatgtatagcagtattaccctatagttttattgcttactactaacatggatacagatgttacaaatgtagaagatatcataaatgaaatagatagagagaaagaagaaatactaaaaaatgtagaaattgaaaataataaaaacattaacaagaatcatccaagtggatatattagagaagcactcgttattaatactagtagtaatagtgattccattgataaagaagttatagaatgtatctgtcacgatgtaggaatatagatcatatctactaatttttataatcgatacaaaacataaaaaacaactcgttattacatagcaggcatggaatccttcaagtattgttttgataacgatggcaagaaatggattatcggaaatactttatattctggtaattcaatactctataaggtcagaaaaaatttcactagttcgttctacaattacgtaatgaagatagatcacaaatcacacaagccattgttgtctgaaatacgattctatatatctgtattggatcctttgactatcgacaactggacacgggaacgtggtataaagtatttggctattccagatctgtatggaattggagaaaccgatgattatatgttcttcgttataaagaattcgggaagagtattcgccccaaaggatactgaatcagtcttcgaagcatgcgtcactatgataaacacgttagagtttatacactctcaaggatttacccatggaaaaatagaaccgaggaatatactgattagaaataaacgtctttcactaattgactattctagaactaacaaactatacaagagtggaaactcacatatagattacaacgaggacatgataacttcaggaaatatcaattatatgtgtgtagacaatcatcttggagcaacagtttcaagacgaggagatttagaaatgttgggatattgcatgatagaatggttcggtggcaaacttccatggaaaaacgaaagtagtataaaagtaataaaacaaaaaaaagaatataaaaaatttatagctactttctttgaggactgttttcctgaaggaaatgaacctctggaattagttagatatatagaattagtatacacgttagattattctcaaactcctaattatgacagactacgtaaactgtttatacaagattgaaattatattcttttttttatagagtgtggtagtgttacggatatctaatattaatattagactatctctatcgcgctacacgaccaatatcgattactatggatatcttctatgaaaggagagaatgtatttatttctccagcgtcaatctcgtcagtattgacaatactgtattatggagctaatggatccactgctgaacagctatcaaaatatgtagaaacggaggagaacacggataaggttagcgctcagaatatctcattcaaatccatgaataaagtatatgggcgatattctgccgtgtttaaagattcctttttgagaaaaattggcgataagtttcaaactgttgacttcactgattgtcgcactatagatgcaatcaacaagtgtgtagatatctttactgaggggaaaatcaatccactattggatgaaccattgtctcctagcaattagtgccgtatactttaaagcaaaatggttgacgccattcgaaaaggaatttaccagtgattatcccttttacgtatctccgacggaaatggtagacgtaagtatgatgtctatgtacggcaaggcatttaatcacgcatctgtaaaagaatcattcggcaacttttcaatcatagaactgccatatgttggagatactagtatgatggtcattcttccagacaagattgatggattagaatccatagaacaaaatctaacagatacaaattttaagaaatggtgtgactttatggatgctatgtttatagatgttcacattcccaagtttaaggtaacaggctcgtataatctggtggatactctagtaaagtcaggactgacagaggtgttcggttcaactggagattatagcaatatgtgtaatttagatgtgagtgtcgacgctatgatccacaaaacgtatatagatgtcaatgaagagtatacagaagcagctgcagcaacttctgtactagtggcagactgtgcatcaacaattacaaatgagttctgtgcagatcatccgttcatctatgtgattaggcatgttgatggaaaaattcttttcgttggtagatattgctctccgacaactaattgttaaccattttttttaaaaaaaatagaaaaaacatgtggtattagtgcaggtcgttgttcttccaattgcaattggtaagatgacggccaactttagtacccacgtcttttcaccacagcactgtggatgtgacagactgaccagtattgatgacgtcaaacaatgtttgactgaatatatttattggtcgtcctatgcataccgcaacaggcaatgcgctggacaattgtattccacactcctctcttttagagatgatgcggaattagtgttcatcgacattcgcgagctggtaaaaaatatgccgtgggatgatgtcaaagattgtacagaaatcatccgttgttatataccggatgagcaaaaaaccatcagagagatttcggccatcatcggactttgtgcatatgctgctacttactggggaggtgaagaccatcccactagtaacagtctgaacgcattgtttgtgatgcttgagatgctaaattacgtggattataacatcatattccggcgtatgaattgatgagttgtacatcttgacattttctttcttctcttctccctttcttctcttctcccttcctccctcttctccctttcccagaaacaaacttttttacccactataaaataaaatgagtatactacctgttatatttctttctatatttttttattcttcattcgttcagacttttaacgcgtctgaatgtatcgacaaagggcaatattttgcatcattcatggagttagaaaacgagccagtaatcttaccatgtcctcaaataaatacgctatcatccggatataatatattagatattttatgggaaaaacgaggagcggataatgatagaattataccgatagataatggtagcaatatgctaattctgaacccgacacaatcagactctggtatttatatatgcattaccacgaacgaaacctactgtgacatgatgtcgttaaatttgacaatcgtgtctgtctcagaatcaaatatagattttatctcgtatccacaaatagtaaatgagagatctactggcgaaatggtatgtcccaatattaatgcatttattgctagtaacgtaaacgcagatattatatggagcggacatcgacgccttagaaataagagacttaaacaacggacacctggaattattaccatagaagatgttagaaaaaatgatgctggttattatacatgtgttttagaatatatatacggtggcaaaacatataacgtaaccagaattgtaaaattagaggtacgggataaaataataccttctactatgcaattaccagatggcattgtaacttcaataggtagtaatttgactattgcatcgttgagacctcccacaacggatgcagacgtcttttggataagtaatggtatgtattacgaagaagatgatggggacggaaacggtagaataagtgtagcaaataaaatctatatgaccgataagagacgtgttattacatcccggttaaacattaatcctgtcaaggaagaagatgctacaacgtttacgtgtatggcgtttactattcctagcatcagcaaaacagttactgttagtataacgtgaatgtatgttgttacatttccatgtcaattgagtttataagaatttttatacattatcttccaacaaacaattgacgaacgtattgctatgattaactcccacgatactatgcatattattaatcattaacttgcagactatacctagtgctattttgacatactcatgttcttgtgtaattgcggtatctatattattaaagtacgtaaatctagctatagttttattatttaattttagataatataccgtctccttatttttaaaaattgccacatcctttattaaatcatgaatgggaatttctatgtcatcgttagtatattgtgaacaacaagagcagatatctataggaaagggtggaatgcgatacattgatctatgtagttttaaaacacacgcgaactttgaagaatttatataaatcattccatcgatacatccttctatgttgagatgtatatatccaggaattcgtttattaatatcgggaaatgtataaactaaaacattgcccgaaagcggtgcctctatctgcgttatatccgttcttaacttacaaaatgtaaccaatacctttgcatgacttgttttgttcggcaacgttagtttaaacttgacgaatggattaattacaatagcatgatccgcgcatctattaagtttttttactttaacgcccttgtatgtttttacagagactttatctaaatttctagtgcttgtatgtgttataaatataacgggatatagaaccgaatcacctaccttagatacccaattacattttatcagatccagataataaacaaattttgtcgccctaactaattctatattgttatatattttacaattggttatgatatcatgtaataacttggagtctaacgcgcatcgtcgtacgtttatacaattgtgatttagtgtagtatatctacacatgtatttttccgcactatagtattctggactagtgataaaactatcgttatatctatcttcaatgaactcatcgagatattgctctctgtcatattcatacacctgcataaactttctagacatcttacaatccgtgttattttaggatcatatttacatatttacgggtatatcaaagatgttagattagttaatgggaatcgtctataataatgaatattaaacaattatatgaggacttttaccacaaagcatcataaaaatgagtcgtcgtctgatttatgttttaaatatcaaccgcaaatcaactcataaaatacaagagaatgaaatatatacatattttagtcattgcaatatagaccatacttctacagaacttgattttgtagttaaaaactatgatctaaacagacgacaacctgtaactgggtatactgcactacactgctatttgtataataattactttacaaacgatgtactgaagatattattaaatcatggagtggatgtaacgatgaaaaccagtagcggacgtatgcctgtttatatattgcttactagatgttgtaatatttcacatgatgtagtgatagatatgatagacaaagataaaaaccacttattacatagagactattccaacctattactagagtatataaaatctcgttacatgttattaaaggaagaggatatcgatgagaacatagtatccactttattagataagggaatcgatcctaactttaaacaagacggatatacagcgttacattattattatttgtgtctcgcacacgtttataaaccaggtgagtgtagaaaaccgataacgataaaaaaggccaagcgaattatttctttgtttatacaacatggagctaatctaaacgcgttagataattgtggtaatacaccattccatttgtatcttagtattgaaatgtgtaataatattcatatgactaaaatgctgttgacttttaatccgaatttcgaaatatgtaataatcatggattaacgcctatactatgttatataacttccgactacatacaacacgatattcttgttatgttaatacatcactatgaaacaaatgttggagaaatgccgatagatgagcgtcgtatgatcgtattcgagtttatcaaaacatattctacacgtccggcagattcgataacttatttgatgaataggtttaaaaatataaatatttatacccgctatgaaggaaagacattattacacgtagcatgtgaatataataatacacacgtaatagattatcttatacgtatcaacggagatataaatgcgttaaccgacaataacaaacacgctacacaactcattatagataacaaagaaaattccccatataccattaattgtttactgtatatacttagatatattgtagataagaatgtgataagatcgttggtggatcaacttccatctctacctatctttcgtcgcttatcatactagtcatatcctaaatgttgatcatattccaccaaatgattgtgaaagagattgagattaaatcgtctaacaaacaattagtttttatgacattaacatataataaataaattaatcattattgacttaacgatgacgaaagttatcatcatcttaggattcttgattattaatacaaattcattgtctatgaaatgtgaacaaggtgtctcatattataattcacaagaattaaagtgttgtaaactatgtaagccaggaacatattcagatcatcgatgtgataaatacagcgataccatttgtggacattgtccgagtgacacattcacgtcaatatataatcgttctccttggtgtcatagttgtagaggtccatgtggtactaatcgagtagaggtcacaccttgtacacctaccacaaatagaatctgtcattgtgactcgaatagttattgtctccttaaagcttctgatggtaactgtgttacatgtgctcctaaaacaaaatgtggtcgtgggtatggaaagaaaggagaagatgaaatgggtaataccatttgtaagaaatgtcggaagggtacttattcagatattgtatctgactctgatcaatgtaaaccaatgacaagataagacttactcgcatctactggatagacataaaatatcctcctcgtaataatgaaatataaatatacactaattattaatatcaataacaatcgagtattaatatataggtcatttttaaatcccttttgggttccgtcccaaacggcgtttcggtctgcgtcgccgccatggccatgccgagcctctccgcgtgctcctccatcgaggacgacttcaactatggcagctcggtggcgtctgccagcgtgcacatacgaatggcatttctaagaaaagtctacggtatcctttgtctacaatttcttttaacaacggcaacaactgcagtatttttatactttgactgcatgcggacatttatacaagggagtcctgttctaatattggcatcaatgttcggatctataggcttgattttcgcattgactttacacagacataaacatcccctgaatctgtacctgctttgtggatttacactgtcggaatctctaacgctggcctctgttgttactttctatgatgtgcatgtcgttatgcaagctttcatgctgactactgcagcgtttcttgctctgactacatatactctacaatcaaagagagatttcagtaaacttggagcaggattgtttgctgctttgtggattttaattttgtcaggactcttggggatatttgtgcaaaatgagacagtggagctggtcctgtctgcttttggggcccttgtattctgtggattcattatctatgacacgcactcactaatacataagctctcgcctgaagagtatgtgttagcctctatcaatctctacttggatatcatcaatctgttcttgcatctgttgcagcttttggaagtatctaataagaaataaagtttaaaatagaattaataaaaacatataggtcattttttaaacatggattggaaaccaaggtagttagttaatacacacaagatatatttttttcacatcatccacccatgggtaacaccaaggttgttagttaataatatacaagatattttttctcactctgatccatgtaaaccaaggacgagataagacactctcattcctcatccacaacccattaaaaaaatggaaattaaagccctctattagcataaacggctacaggtctaccatcaggttaaccttcgtctaccttcacaatggcctttccttgtgcccagttcagaccctgtcattgccacgctactaaggactccctgaataccgtggccgacgtcagacattgtctgactgaatacatcctgtgggtttctcatagatggacccatagagaaagcgctcatctgttctccgtgtggtctcggaacatattctcacaccgtctcttccgcagataaatgcgaacccgtacccagaaatacctttaactatatcgatgtggaaattaatctgtatcccgtcaacgacacatcgtgtactcggacgaccactaccggtctcagcgaatccatctcaacgtcggaactaactattactatgaatcataaagactgtaatcccgtctttcgtgatggatacttctccgttcttaataaggtagcgacttcaggtttctttacaggagaaaggtgtgcactctgaatttcgagattaaatgcaataacaaagattcttcctccaaacagttaacgaaagcaaagaatgatactatcatgccgcattcggagacagtaactctagtgggcgacatctatatactatatagtaataccaatactcaagactacgaaactgatacaatctcttatcatgtgggtaatgttctcgatgtcgatagccatatgcccggtagttgcgatatacataaactgatcactaattccaaacccacccactttttatagtaagtttttcacccataaataataaatacaataattaatttctcgtaaaagtagaaaatatattctaatttattgcacggtaaggaagtagaatcataaagaacagtactcaatcaatagcaattatgaaacaatatatcgtcctggcatgcatgtgcctggcggcagctgctatgcctgccagtcttcagcaatcatcctcatcctcctcctcgtgtacggaagaagaaaacaaacatcatatgggaatcgatgttattatcaaagtcacaaagcaagaccaaacaccgaccaatgataagatttgccaatccgtaacggaaattacagagtccgagtcagatccagatcccgaggtggaatcagaagatgattccacatcagtcgaggatgtagatcctcctaccacttattactccatcatcggtggaggtctgagaatgaactttggattcaccaaatgtcctcagattaaatccatctcagaatccgctgatggaaacacagtgaatgctagattgtccagcgtgtccccaggacaaggtaaggactcatgaagaagctcttgctatgatcaaagactgtgaggtgtctatcgacatcagatgtagcgaagaagagaaagacagcgacatccagtactcgggtctaacatctctcataagaaagtgagttacgaagatatcatcggttcaacgatcgtcgatacaaaatgtgtcaagaatctagagtttagcgttcgtatcggagacatgtgcaaggaatcatctgaacttgaggtcaaggatggattcaagtatgtcgacggatcggcatctgaaggtgcaaccgatgatacttcactcatcgattcaacaaaactcaaagcgtgtgtctgaatcgataactctattcatctgaaattggatgagtagggttaatcgaacgattcaggcacaccacgaattaaaaaagtgtaccggacactatattccggtttgcaaaacaaaaatgttcttaactacattcacaaaaagttacctctcgcgacttcttctttttctgtctcaatagtgtgatacgattatgacactattcctattcctattcctatttcctttcagagtatcacaaaaatattaaacctctttctgatggtctcataaaaaaagttttacaaaaatatttttattctctttctctctttgatggtctcataaaaaaagttttacaaaaatatttttattctctttctctctttgatggtctcataaaaaaagttttacaaaaatatttttattctctttctctctttgatggtctcataaaaaaagttttacaaaaatatttttattctctttctctctttgatggtctcataaaaaaagttttacaaaaatatttttattctctttctctctttgatggtctcataaaaaaagttttacaaaaatatttttattctctttctctctttgatggtctcataaaaaaagttttacaaaaatatttttattctctttctctctttgatggtctcataaaaaaagttttacaaaaatatttttattctctttctctctttgatggtctcataaaaaaagttttacaaaaatatttttattctctttctctctttgatggtctcataaaaaaagttttacaaaaatatttttattctctttctctctttgatggtctcataaaaaaa

SEQ ID NO: 3 - DNA, 193964 bp, Artificial Sequence
  LIVP 2.1.1
gagatagttagtctagatatttttcttagtacaaaagtcaatgttttaaaatatatggacaagaatttgtctgtataaaaacttgtgtgaaattttgtaccaaagaaaaaatgtgagcagtatcccctacatggattttactagatcatttatataccaaaaaatattatacgatctacgttttattatatgattttaacgtgtaaattataaacattattttatgatatacaattgtctggtaacctagatgggcataggggatgttgataagctcgacgagtatatgttgttggacgttattgtttaagaaatagttgatgcatcagaaagagaataaaaaatattttagtgagaccatcgaagagagaaagagataaaacttttttacgactccatcagaaagaggtttaatatttttgtgagaccatcgaagagagaaagagaataaaaatattttatgactccattgaagagagaaaaagaaaatgagaatgagaataaaaatattttagtgacaccatcagaaagaggtttaatatttttgtgagaccatcgaagagagaaagagaataaaaatattttatgactccattgaagagagaaagagaaaatgagaatgagaataaaaatattttagtgacaccatcagaaagaggtttaatattttttatgagaccatcaaagagagaaagaaaataaaaatatttttgtaaaactttttttatgagaccatcaaagagagaaagagaataaaaatatttttgtaaaactttttttatgagaccatcaaagagagaaagagaataaaaatatttttgtaaaactttttttatgagaccatcaaagagagaaagagaataaaaatatttttgtaaaactttttttatgagaccatcaaagagagaaagagaataaaaatatttttgtaaaactttttttatgagaccatcaaagagagaaagagaataaaaatatttttgtaaaactttttttatgagaccatcaaagagagaaagagaataaaaatatttttgtaaaactttttttatgagaccatcaaagagagaaagagaataaaaatatttttgtaaaactttttttatgagaccatcaaagagagaaagagaataaaaatatttttgtaaaactttttttatgagaccatcaaagagagaaagagaataaaaatatttttgtaaaactttttttatgagaccatcaaagagagaaagagaataaaaatatttttgtaaaactttttttatgagaccatcagaaagaggtttaatatttttgtgatactctgaaaggaaataggaataggaataggaatagtgtcataatcgtatcacactattgagacagaaaaagaagaagtcgcgagaggtaactttttgtgaatgtagttaagaacatttttgttttgcaaaccggaatatagtgtccggtacacttttttaattcgtggtgtgtctgaatcgttcgattaaccctactcatccaatttcagatgaatagagttatcgattcagacacacgctttgagttttgttgaatcgatgagtgaagtatcatcggttgcaccttcagatgccgatccgtcgacatacttgaatccatccttgacctcaagttcagatgattccttgcacatgtctccgatacgaacgctaaactctagattcttgacgcattttgtatcgacgatcgttgaaccgatgatatcttcgtaactcactttcttatgagagatgttagacccgagtactggatgggtcttgatgtcgctgtctttctcttcttcgctacatctgatgtcgatagacacttcacagtctttgatcatagcaagagcttcttcatgagtgatcgcgggagagtccttaccttgtcctggggacacgctggacaatctagcattcactgtgtttccatcagcggattctgagatggatttaatctgaggacatttggtgaatccaaagttcattctcagacctccaccgatgatggagtaataagtggtaggaggatctacatcctcgactgatgtggaatcatcttctgattccacctcgggatctggatctgactcggactctgtaatttccgttacggattggcaaatcttatcattggtcggtgtttggtcttgctttgtgactttgataataacatcgattcccatatgatgtttgttttcttcttccgtacacgaggaggaggatgaggatgattgctgaagactggcaggcatagcagctgccgccaggcacatgcatgccaggacgatatattgtttcataattgctattgattgagtactgttctttatgattctacttccttaccgtgcaataaattagaatatattttctacttttacgagaaattaattattgtatttattatttatgggtgaaaaacttactataaaaagtgggtgggtttggaattagtgatcagtttatgtatatcgcaactaccgggcatatggctatcgacatcgagaacattacccacatgataagagattgtatcagtttcgtagtcttgagtattggtattactatatagtatatagatgtcgcccactagagttactgtctccgaatgcggcatgatagtatcattctttgctttcgttaactgtttggaggaagaatctttgttattgcatttaatctcgaaattcagagtgcacacctttctcctgtaaagaaacctgaagtcgctaccttattaagaacggagaagtatccatcacgaaagacgggattacagtctttatgattcatagtaatagttagttccgacgttgagatggattcgctgagaccggtagtggtcgtccgagtacacgacgtgtcgttgacgggatacaggttaatttccacatcgatatagttaaaggtattactgggtacgggttcgcatttatctgcggaagagacggtgtgagaatatgttccgagaccacacggagaacagatgacgtctccggatactccgtatcctattctacattttgtttgggaaacacatgccttgcatccggatgatcctttgagaagacaataatatccgggagagcattcacagattctattgtgagtcgtgttacacgatcgcgtcttccgttacaacttagacaagcgggtaaatgattattgcgagatgtgaaggtacccgaaccacacggcgtacattgtgtgttagtcttgctatcgcataatctggaagcgtatgttcccggacacaaattatggcgtttgtattcgttgtctttacactttccatcggatggtgcatgcggtgctatatctcttccgtttattattatacatgagagaaacaatatatacgagtataatacggacttcatgatttaataatgtagtaatcgtcgtcttgttcctgtttcctacttctccaatcatatagatattttctttctatcatggataatatttgtaatggttctttccgtacaacatactgtttagatgatattgcgcataatttccggaggcaaatacgatagtctagattgaccgatggtagactctaatttattgagtgctttgtcgacgagtttacttttacgctccatcgatagatggcactgttctatgagatcgtcgtacatgggaaatgaaatgtgactgtctgaatgtatggctttaagatagctgtgataccgtatacaggtcggtgtcggagattcgaatctctttaaggcgacttatgtcacgatgatggaatctatcttatcgaatgatatatttttcataaatacacttttatagtcctcgtttaaacagaatttactatgtagttccgcgaatgactcgtcccttaataggcagtaggctagtatcttttttacgtagtaatcgtcgtagggagagacatcttgtagaacaacgatttaatcataggtagagatactttcagtctgtggtggatgatgtcattcacaacatccgccttgtatatgatgtttctgttttcaaacaccaagtcgaataccgtctttagtcggaaggttgatgtcgtatccgatgtatgaggcaacattgttgttacaattttgaaaggcggtattatagtattcgtctttctgaatgtcgaacctatctaatagataccgtagtatattgagagtgtatccttgattatgttttatgaatagataaagtagatgttgtccttcttccttttgttcgtgccaattgagtaacattatgagaatatgacctgttgcacaatcgttccatgatgggtgtacaatcaagattattacgtatcctcgtatcggctcctcgagataaaagagcatacaccacacgaggactatgtttggtatactgttgaaggtaagtgtgtaaccgcgttaatgtttgctccataatctattatcgcgtagatgaatcgcttctcggctcgcatcttagtgtgacttaacttgtaataattgctttcgtagaacgtggatatgtgtttacagtagtaatgaagagaagtgagttcatcctcgtcggcgcaattagggtcggatcctttgtacagaacgtaatagtttaagctcccattgaatttatatctaagataacacagcaatagatcggatgatttactaaagtcatcaatggtgtccgttagtatatcaaagatcttgttatcgattgatagtggtcatccttgctatcaaagttacgcatgccgtggtgtaacaatatctttaatacagatggattaaatcgtgtattcatcgtatagcaatgtaatggagagttacctcgtttattcagatcgcagtgtttaataactagcttaaacagatgagacgatgtatccacatcaaagaacgtaaaatacatatgacagacattgttgacagaaacgtgaccttcattcttaccgtcgtccataaatacgttaggtatgtaccacatactgtcgcgaacgatgcgtacaatctcgtccatctcataatgatttactttttcataattaaagatgtgaaagaaaaccgaacaatatatttttttagtaatgtttatgcgagacatataaaataaactccgtgtttatgatgccggtaaatgtttttatcatcttggacggaatcgattttgtaatatgtcatggaaacaaatgaaacaggacattatcgctccatgataaattatttaatggagtaataaagtatctccatgggtaatttcgaaatcaagttatcgtctgtattaatgttgtccactatggagtcgatcctctcattgttctttacagtttctgtaatgatggacgttagttcttttttgtaccatttgatgtcggattctttgcgtatctcaatttgtggcgtttgcttcgtttaaataatatatcaaacatggagacgcctgatatgtagacattcttcattctattaatgtctactctatagcgctttagttccttatgacgaccggcgatatcatactttactttagaaggaaaatcatcatctaggattaaggcgtatctgatacaggcgaataatggttcaggatatagatagcgtatatctctattaaatgcgtcaatcatagtctctagagtgggatggtaactcagtaataaatcaactagcttcgttttgttttctctttggtaactgcttttctggatggccgtattgattatcgagcgtgacactcgctccatattccaataaccgctttgcaaattgtatattattgacatcgaccgcgtaatatagtagagttatcgatcatatctatatcatccatgtacttgcttagtatatcaaatacatctatcagtatggtttcataacagtgatacccgcaattattaaatctcgataatatcagaccgtacatacatagacggccattgttcgatacgtgatttacagccgcgtgtccatattttccacgataaaccttacgacgtttacatcgacgagattattattaacaaagtagtcgtgcagaggatagttgttgtccgttatctaacatgcatcgaacgaccatatcgccgtaatgtaagtagtttatcaacatggcttgtacatcctgttgtctaaatctctttagaatgttatcgatgatgtagtggttatattctctggaatcgtacgaagtaatactacgcattacgtcgacaagagtatgacgtctctcaataagaagattaacgatttccatgtctacattatatggggttactctaaatcgcttgtttagataatatagggctgacgtcgtatactctacacgtgtccacatcctttattaataataatttaacaatctctatatctatggttgagaaagaccagtagtattggatgggtaaagatcctccttcgtctctgccatggatggaaacattgttatcgatcaaacatttaattacatccttggatagagattgagattctctatgagacgatatatagtaatgaagagagttcttacacatatcactgtcgtacatacaggtacgaaatacgtaaccggtgctgtaacattctgatttaagaagccatagcaatacttctggtctcggattaggcgtcgttacgtatatatccaccaatccgagaccattgattgcataattcgtattcttggacggacgtatccgtttatccacaattaggtattttagcagacgtaagtcgatattatccgaatacagatcgaaatcatttatattcgacttgagttcgttagaggaatttgaatagctggatatcagtagatgcacaatctgagatttgacgtatctatgcttactgtatactcctagcggagttaatccttcgttgtttctacaaagtctctcgactccgcgagagaacaatcttaatgtctgtatcgcatttattggagacgtaacaatgtagcgcattgtttcctcgtctatctatatgttttgataagttgtgacacgtttcaatttctagttttatttttttgtacgtcacatcttcatccagtagacgacatagaatagtgcactctctaccacaataatccatagctattctggtgctaattattcctatttcacgaaggcaatcattcctcataagatgataaaaagtgtagtggagatttagtatttagcagtgcggatatgatccaagagggtgagatagtcgttctcgttcagaatctttcgcagcataagtagtatgtcgatatacttatcgttgaagactctttataaaagtctatttgtttatatttattgcggatagcagtatttccctataaaaagtatacgtcctgtggtgtctttaatcatgtacatgaatggatggtttatgtagaccttcgtacgatataccatcgaaaagttaatcgtaaatactcctgtaacggccgatgcttctgtatactcctcattaacatctataaacgtcgtatgtagaaatttttctacagtgatagtttcattacacatcttgctaaaatctgcataatatccgaatatattagtaagtcctaaattttctaaaatcggtaccagattatacggttctgtcatttccactttaaactttggcatatacaagtctatacttttagtagataacataccacaccattttttaaatttttcatctgttatatttttttctatgttatatataccttctatgtcgtccggtagtataattaccatactagagtttccctcgtatggaatatcgataatagagaatcctccgaataattcattaatatgtacatattgcaagttattctcggtacccaccatcatatcaacgctggtaactatattcttagaaatataaaacttgtctgtatatgtaagatgtttagaaaatggatatttccacattgctttaaaatggacggcgctaacaactgtcatacgagtattaatggatagcggactagtcaataaggaattaattttaccatttgtcattgtcttaacccattcgttgattagttcctttgtttggttagcattattaaagtttacagtttgaaaatcgtcttttattttttgtaggaaggaggcgtggaactcgatactatcgctaccgtatattttatttgcggtagctagtgtcgcacaatacggaatatctacctccatgtcatcattattgtcatcgggtgtattctcattcatattctctatatattttgatagttgttcagctgtagaaccagctgctccatgatttagaatagataaagtagataaaatggaaactggagaaatcaaaacattttcatcagggtgttttaagattagttctttaaagatatccatggtatagacctaacgataacgatatatatcataaataaataatgttaaatttcaatttatgtttgtaccccgtattcatacttaacaaattggtattgcgtacacaatcaatcatattacataccattaataatgcaagcataaaaaattgttagtagatgtttctaaatataggttccgtaagcaaagaatataagaatgaagcggtaatgataaaatcaatcgttatctaaaatgatcatactcatttattttattctattatattaacacatacatttttaacagcaacacattcaatattgtattgttatttttatattatttacacaattaacaatatattattagtttatattactgaattaataatataaaattcccaatcttgtcataaacacacactgagaaacagcataaacacagaatccatcaaaaatgttgataaattatctgatgttgttgttcgctgctatgataatcagatcattcgccgatagtggtaacgctatcgaaacgacattgccagaaattacaaacgctacaacagatattccagctatcagattatgcggtccagagggagatggatattgtttacacggtgactgtatccacgctagagatattgacggtatgtattgtagatgctctcatggttatacaggcattagatgtcagcatgtagtattagtagactatcaacgttcagaaaacccaaacactacaacgtcatatatcccatctcccggtattatgcttgtattagtaggcattattatgtgttgtctattatctgtttataggttcactcgacgaactaaactacctatacaagatatggttgtgccataatttttataaattttttttatgagtatttttacaaaaatgtataaagtgtatgtcttatgtatatttataaaaatgctaagtatgcgatgtatctatgttatttgtatttatctaaacaatacctctacctctagatattatacaaaaattttttatttcggcatattaaagtaaaatctagttaccttgaaaatgaatacagtgggtggttccgtatcaccagtaagaacataatagtcaaatacagtatccgattgagattttgcatacaatactagtctagaaagaaatttgtaatcatcttctgtgacgggagtccatatatctgtatcatcgtctagtttatcagtgtcccatgctatattcctgttatcatcattagttaatgaaaataactctcgtgcttcagaaaagtcaaatattgtatccatacatacatctccaaaactatcgcttatacgtttatctttaacgatacctatacctagatggttatttactaacagacattttccagatctattgactataactcctatagtttccacatcaaccaagtaatgatcatctattgttatataacaataacataactcttttccatttttatcagtatgtatatctatatcaacgtcgtcgttgtagtgaatagtagtcattgatctattatatgaaacggatatgtctagaacggcaattgttttacgtccagttaacactttcgttgatttaaagtctagagtctttgcaaacataatatccttatccgactttatatttcctgtagggtggtataattttattttgcctccacatatcggtgtttccaaatatattactagacaatattccatatagttattagttaagggtacccaattagaacacgtacgcttattatcatcatttggatcgtatttcataaaagttattgtgttatcgatgtcaacacattctacattttttaatcgtctatatagtatttttctgatattttctataatatcagaattgtcttccatcggaagttgtatactatcggaatcagttacatgtttaaataattctctgatgtcattccttatacaatcaaattcattattaaacagtttaatagtctgtagacctttatcgtcgtaaatatccattgtcttattagttacgcttatttttatgtgttttacgttgctttattatattttataagaatgattgtttgacgaatcacgagaactattaagacacattattaggtatatattataaaaaagtttttgattacgatgttataagaggaaagaggacacattaacatcatacatcaattaactacattcttataacatcgtaatcaaaagaattgcaattttgatgtataacaactgtcaatgggttatggaattgtatattacatattatacggtatgttggtaacgacaaataccggtcggtaattgtctgccggtgtaatagaattatatatatctatctattacaccggccttgtatacataataataagttgtggtagtatgatctccatatttataatttaggactttgtattcagtatttttggaatcataaaaaataaaaaaaagttttactaatttaaaatttaaaaagtatttacatttttttcactgtttagtcgcggatatggaattcgatcctgccaaaatcaatacatcatctatagatcatgtaacaatattacaatacatagatgaaccaaatgatataagactaacagtatgcattatccgaaatattatatcaatatcacaaaaataaatacacatttggctaatcaatttcgggcttggaaaaaacgtatcgccggaagggactatatgactaacttatctagagatacaggaatacaacaatcaaaacttactgaaactatacgtaactgtcaaaaaaatagaaacatatatggtctatatatacactacaatttagttattaattggataaccgatgtgattatcaatcaatattaagagggttggtaaattggtacatagctaataatacctatactccaaatacacccaataatacaacaaccatttctgagttggatatcatcaaaatactggataaatacgaggacgtgtatagagtaagtaaagaaaaagaatgtggaatttgctatgaagttgtttactcaaaacgatagatactttggtttattggattcgtgtactcatatattttgcataacatgcatcaatatatggcataaaacacgaagagaaaccggtgcgtcggataattgtcctatatgccgtacccgttttagaaacataacaatgagcaagttctataagctagttaactaataaataaaaagtttaatttgttgacgacgtatgtcgttattttttctcgtataaaagattaatttgattctaatataatctttagtattggataaatatcaattcaaattaattccattagattatatcataaataaaaatagtagcacgcactacttcagccaaatattcttttttgaaacgccatctatcgtagtgaggacacaagtgaacctataattatcaaatttattagtatcagtcacatgaaggactttacgtagagtgacgattccactatctgtggtacgaacggtttcatcttctttgatgccatcacccagatgttctataaacttggtatcctcgtccgatctcatatcctttgccaaccaatacatgtagctaaaattaggcataaatttcacacatcctgaacaatgaaattctccagaagatgttacaatgtctagatttggacatttggtttcaaccgcgttaacatatgagtgaacacacccatacatgaaagcgatgagaaataggattctcatcttgccaaaatatcactagaaaaaatttatttatcaattttaaaggtataaaaaatacttattgttgctcgaatattttgtatttgatggtatacggaagattagaaatgtaggtattatcatcaactgattctatggttttatgtattctatcatgtttcactattgcgttggaaataatatcatatgcttccacatatattttattttgttttaactcataatactcacgtaattctggattattggcatatctatgaataattttagctccatgatcagtaaatattaatgagaacatagtattaccacctaccattatttttttcatctcattcaattcttaattgcaaagatctatataatcattatagcgttgacttatggactctggaatcttagacgatgtacagtcatctataatcatggcatatttaatacattgttttatagcatagtcgttatctacgatgttagatatttctctcaatgaatcaatcacacaatctaatgtaggtttatgacataatagcattttcagcagttcaatgtttttagattcgttgatggcaatggctatacatgtatatccgttatttgatctaatgttgacatctgaaccggattctagcagtaaagatactagagattgtttattatatctaacagccttgtgaagaagtgtttctcctcgtttgtcaatcatgttaatgtctttaagataaggtaggcaaatgtttatagtactaagaattgggcaagcataagacatgtcacaaagaccctttttgtatgtataagtgtagaaattataacatccatagttggatttacataggtgtccaatcgggatctctccatcatcgagataattgatggcatctcccttccttttttagtagatatttcatcgtgtaagaatcaatattaatatttctaaagtatccgtgtatagcctctttatttaccacagttccatattccactagagggatatcgccgaatgtcatatactcaattagtatatgttggaggacatccgagttcattgttttcaatatcaaagagatggtttccttatcatttctccatagtggtacaatactacacattatttcgtgcggctttccattttccaaaaacaatttgaccaaatctacatctttattgtatctataatcactatttagataatcagccataattcctcgagtgcaacatgttagatcgtctatatatgaataagccgtgttatctattcctttcattaacaatttaacgatgtctatatctatatgagatgacttaatataatattgaagagctgtacaatagtttttatctataaaagacggcttgattccgtgattaattagacatttaacaacttccggacgcacatatgctctcgtatccgactctgaatacagatgagagatgatatacagatgcaatacggtaccgcaatttcgtagttgataatcatcatacgcgtatcagtactcgtcctcataaagaacactgcagccattttctatgaacaaatcaataatttcaggaacaggatcatctgtcattacataattttctataactgaacgatggttttcacatttaacactcaagtcaaatccatgttctaccaacacctttatcaagtcaacgtctacatttttggatttcatatagctgaatatattaaagttatttatgttgctaaatccagtggcttctagtagagccatcgctatatccttattaactttaacatgtctactatttgtgtattcttctaatggggtaagctgtctccaatttttgcgtaatggattagtgccactgtctagtagtagtttgacgacctcgacattattacaatgctcattaaaaaggtatgcgtgtaaagcattattcttgaattggttcctggtatcattaggatctctgtctctcaacatctgtttaagttcatcgagagccacctcctcattttccaaatagtcaaacattttgactgaatgagctactgtgaactctatacacccacacaactaatgtcattaaatatcatgtcaaaaacttgtacaattattaataaaaataatttagtgtttaaattttaccagttccagattttacacctccgttaatacctccattaaccccactggacgatcctcctccccacattccaccgccaccagatgtataagttttagatcctttattactaccatcatgtccatggataaagacactccacatgccgccactaccccctttagaagacatattaataagacttaaggacaagtttaacaataaaattaatcacgagtaccctactaccaacctacactattatatgattatagtttctatttttacagtaccttgactaaagtttctagtcacaagagcaatactaccaacctacactattatatgattatagtttctatttttataggaacgcgtacgagaaaatcaaatgtctaatttctaacggtagtgttgataaacgattatcgtcaatggatacctcctctatcatgtcgtctattttcttactttgttctattaacttattagcattatatattatttgattataaaacttatattgcttattagcccaatctgtaaatatcggattattaacatatcgtttctttgtaggtttatttaacttgtacatcactgtaagcatgtccttaccatttattttaatttgacgcatatccgcaatttctttttcgcagtcggttataaattctatatatgatggatacatgctacatgtgtacttataatcgactaatatgaagtacttgatacatatttccagtaacgatttattattaccacctatgaataagtacctgtgatcgtctaggtaatcaactgttttcttaatacattcgatggttggtaatttactcagaataatttccaatatcttaatatataattctgctatttctgggatatatttatctgccagtataacacaaatagtaatacatgtaaacccatattttgttattatattaatgtctgcgccattatctattaaccattctactaggctgacactatgcgactcaatacaatgataaagtatactacatccatgtttatctattttgtttatatcattaatatacggcttacaaagttttagtatcgataacacatccaactcacgcatagagaaggtagggaataatggcataatatttattaggttatcatcattgtcattatctacaactaagtttccattttttaaaatatactcgacaactttaggatctctattgccaaatttttgaaaatatttatttatatgcttaaatctatataatgtagctccttcatcaatcatacatttaataacattgatgtatactgtatgataagatacatattctaacaatagatcttgtatagaatctgtatatcttttaagaattgtggatattaggatattattacgtaaactattacacaattctaaaatataaaacgtatcacggtcgaataatagttgatcaactatataattatcgattttgtgatttttcttcctaaactgtttacgtaaatagttagatagaatattcattagttcatgaccactatagttactatcgaataacgcgtcaaatatttcccgtttaatatcgcatttgtcaagataataatagagtgtggtatgttcacgataagtataataacgcatctctttttcgtgtgaaattaaatagtttattacgtccaaagatgtagcataaccatcttgtgacctagtaataatataataatagagaactgttttacccattctatcatcataatcagtggtgtagtcgtaatcgtaatcgtctaattcatcatcccaattataatattcaccagcacgtctaatctgttctattttgatcttgtatccatactgtatgttgctacatgtaggtattcctttatccaataatagtttaaacacatctacattgggatttgatgttgtagcgtatttttctacaatattaataccatttttgatactatttatttctatacctttcgaaattagtaatttcaataagtctatatcgatgttatcagaacatagatattcgaatatatcaaaatcattgatatttttatagtcgactgacgacaataacaaaatcacgacatcgtttttgatattattatttttcttggtaacgtatgcctttaatggagtttcaccatcatactcatataatggatttgcaccactttctatcaatgattgtgcactgctggcatcgatgttaaatgttttacaactatcatagagtatcttatcgttaaccatgattggttgttgatgctatcgcattttttggtttctttcatttcagttatgtatggatttagcacgtttgggaagcatgagctcatatgatttcagtactgtagtgtcagtactattagtttcaataagatcaatctctagatctatagaatcaaaacacgataggtcagaagataatgaatatctgtaggcttcttgttgtactgtaacttctggttttgttagatggttgcatcgtgctttaacgtcaatggtacaaattttatcctcgctttgtgtatcatattcgtccctactataaaattgtatattcagattatcatgcgatgtgtatacgctaacggtatcaataaacggagcacaccatttagtcataaccgtaatccaaaaatttttaaagtatatcttaacgaaagaagttgtgtcattgtctacggtgtatggtactagatcctcataagtgtatatatctagagtaatgtttaatttattaaatggttgataatatggatcctcgtgacaatttccgaagatggaaataagacataaacacgcaataaatctaattgcggacatggttactccttaaaaaaatacgaataatcaccttggctatttagtaagtgtcatttaacactatactcatattaatccatggactcataatctctatacgggattaacggatgttctatatacggggatgagtagttctcttctttaactttatactttttactaatcatatttagactgatgtatgggtaatagtgtttgaagagctcgttctcatcatcagaataaatcaatatctctgtttttttgttatacagatgtattacagcctcatatattacgtaatagaacgtgtcatctaccttattaactttcaccgcatagttgtttgcaaatacggttaatcctttgacctcgtcgatttccgaccaatctgggcgtataatgaatctaaactttaattgcttgtaatcattcgaaataatttttagtttgcatccgtagttatcccctttatgtaactgtaaatttctcaacgcgatatctccattaataatgatgtcgaattcgtgctgtatacccatactgaatggatgaacgaataccgacggcgttaatagtaatttactttttcatctttacatattgggtactagttttactatcataagtttataaattccacaagctactatggaataagccaaccatcttagtataacacacatgtcttaaagtttattaattaattacatgttgttttatatatcgctacgaatttaaacagagaaatcagtttaggaaaaaaaattatctatctacatcatcacgtctctgtattctacgatagagtgctactttaagatgcgacagatctgtgtcatcaaatatatactccattaaaatgattattccggcagcgaacttgatattggatatatcacaacctttgttaatatctacgacaatagacagcagtcccatggttccataaacagtgagtttatctttctttgaagagatattttgtagagatcttataaaactgtcgaatgacatcgcatttatatttttagctaaatcgtatatgttaccatcgtaatatctaaccgcgtctatcttaaacgtttccatcgctttaaagacgtttccgatagatggtctcatttcatcagtcatactgagccaacaaatataatcgtgtataacatctttgatagaatcagactctaaagaaaacgaatcggctttattatacgcattcatgataaacttaatgaaaaatgtttttcgttgtttaagttggatgaatagtatgtcttaataattgttattatttcattaattaatatttagtaacgagtacactctataaaaacgagaatgacataactaatcataactagttatcaaagtgtctaggacgcgtaattttcatatggtatagatcctgtaagcattgtctgtattctggagctattttctctatcgcattagtgagttcagaatatgttataaatttaaatcgaataacgaacataactttagtaaagtcgtctatattaactcttttattttctagccatcgtaataccatgtttaagatagtatattctctagttactacgatctcatcgttgtctagaatatcacatactgaatctacatccaattttagaaattggtctgtgttacatatctcttctatattattgttgatgtattgtcgtagaaaactattacgtagaccattttctttataaaacgaatatatagtactccaattatctttaccgatatatttgcacacataatccattctctcaatcactacatctttaagattttcgttgttaagatatttggctaaactatataattctattagatcatcaacagaatcagtatatatttttctagatccaaagacgaactctttggcgtcctctataatattcccagaaaagatattttcgtgttttagtttatcgagatctgatctgttcatatacgccatgattgtacggtacgttatgataaccgcataaaataaaaatccattttcatttttaaccaatactattcataattgagattgatgtaatactttgttactttgaacgtaaagacagtacacggatccgtatctccaacaagcacgtagtaatcaaatttggtgttgttaaacttcgcaatattcatcaatttagatagaaacttatactcatcatctgttttaggaatccatgtattattaccactttccaacttatcattatcccaggctatgtttcgtccatcatcgttgcgcagagtgaataattcttttgtattcggtagttcaaatatatgatccatgcatagatcggcaaagctattgtagatgtgatttttcctaaatctaatataaaactcgtttactagcaaacactttcctgatttatcgaccaagacacatatggtttctaaatctatcaagtggtggggatccatagttatgacgcagtaacatatattattacattcttgactgtcgctaatatctaaatatttattgttatcgtattggattctgcatatagatggcttgtatgtcaaagatatagaacacataaccaatttatagtcgcgctttacattctcgaatctaaagttaagagatttagaaaacattatatcctcggatgatgttatcactgtttctggagtaggatatattaaagtctttacagatttcgtccgattcaaataaatcactaaataatatcccacattatcatctgttagagtagtatcattaaatctattatattttatgaaagatatatcactgctcacctctatatttcgtacatttttaaactgtttgtataatatctctctgatacaatcagatatatctattgtgtcggtagacgataccgttacatttgaattaatggtgttccattttacaacttttaacaagttgaccaattcatttctaatagtatcaaactctccatgattaaatattttaatagtatccattttatatcactacggacacaaagtagctgacataaaccattgtataatttttatgttttatgtttattagcgtacacattttggaagttccggcttccatgtatttcctggagagcaagtagatgatgaggaaccagatagtttatatccgtacttgcacttaaagtctacattgtcgttgtatgagtatgatcttttaaacccgctagacaagtatccgtttgatattgtaggatgtggacatttaacaatctgacacgtgggtggatcggaccattctcctcctgaacacaggacactagagttaccaatcaacgaatatccactattgcaactataagttacaacgctcccatcggtataaaaatcctcgtatccgttatgtcttccgttggatatagatggaggggattggcatttaacagattcacaaataggtgcctcgggattccataccatagatccagtagatcctaattcacaatacgatttagattcaccgatcaactgatatccgctattacaagagtacgttatactagagccaaagtctactccaccaatatcaagttggccattatcgatatctcgaggcgatgggcatctccgtttaatacattgattaaagagtgtccatccagtacctgtacatttagcatatataggtcccattttttgctttctgtatccaggtagacatagatattctatagtgtctcctatgttgtaattagcattagcatcagtctccacactattcttaaatttcatattaatgggtcgtgacggaatagtacagcatgatagaacgcatcctattcccaacaatgtcaggaacgtcacgctctccaccttcatatttatttatccgtaaaaatgttatcctggacatcgtacaaataataaaaagcccatatatgttcgctattgtagaaattgtttttcacagttgctcaaaaacgatggcagtgacttatgagttacgttacactttggagtctcatctttagtaaacatatcataatattcgatattacgagttgacatatcgaacaaattccaagtatttgattttggataatattcgtattttgcatctgctataattaagatataatcaccgcaagaacacacgaacatctttcctacatggttaaagtacatgtacaattctatccatttgtcttccttaactatatatttgtatagataattacgagtctcgtgagtaattccagtaattacatagatgtcgccgtcgtactctacagcataaactatactatgatgtctaggcatgggagacttttttatccaacgatttttagtgaaacattccacatcgtttaatactacatatttctcatacgtggtataaactccacccattacatatatatcatcgtttacgaataccgacgcgcctgaatatctaggagtaattaagtttggaagtcttatccatttcgaagtgccgtgtttcaaatattctgccacacccgttgaaatagaaaattctaatcctcctattacatataactttccatcgttaacacaagtactaacttctgattttaacgacgacatattagtaaccgttttccattttttcgtttcaagatctacccgcgatacggaataaacatgtctattgttaatcatgccgccaataatgtatagacaattatgtaaaacatttgcattatagaattgtctatctgtattaccgactatcgtccaatattctgttctaggagagtaatgggttattgtggatatataatcagagtttttaatgactactatattatgttttataccatttcgtgtcactggctttgtagatttggatatagttaatcccaacaatgatatagcattgcgcatagtattagtcataaacttgggatgtaaaatgttgatgatatctacatcgtttggatttttatgtatccactttaataatatcatagctgtaacatcctcatgatttacgttaacgtcttcgtgggataagatagttgtcagttcatcctttgataattttccaaattctggatcggatgtcaccgcagtaatattgttgattatttctgacatcgacgcattatatagttttttaattccatatcttttagaaaagttaaacatccttatacaatttgtgaaattaatattatgaatcatagtttttacacatagatctactacaggcggaacatcaattattatggcagcaactagtatcatttctacattgtttatggtgatgtttatcttcttccagcgcatatagtctaatagcgattcaaacgcgtgatagtttataccattcaatataatcgcttcatcctttagatggtgatcctgaatgcgtttaaaaaaattatacggagacgccgtaataatttccttattcacttgtataatttccccattgatagaaaatattacgctttccattcttaaagtactataagtaattatagtataatgtaaacgtttatatattcaatatttttataaaaatcattttgacattaattcctttttaaatttccgtctatcatctatagaaacgtattctatgaatttataaaatgcttttacgtgtcctatcgtaggcgatagaaccgctaaaaagcctatcgaatttctacaaaagaatctgttatatggtatagggagagtataaaacattaaatgtccgtacttattaaagtattcagtagccaatcctaactctttcgaatacttattaatggctcttgttctgtacgaatctatttttttgaacaacggacctagtggtatatcttgttctatgtatctaaaataatgtctgactagatccgttagtttaatatccgcagtcatcttgtctagaatggcaaatctaactgcgggtttaggctttagtttagtttctatatctacatctatgtctttatctaacaccaaaaatataatagctaatattttattacaatcatccggatattcttctacgatctcactaactaatgtttctttggttatactagtatagtcactatcggacaaataaagaaaatcagatgatcgatgaataatacatttaaattcatcatctgtaagatttttgagatgtctcattagaatattattagggttagtactcattatcattcggcagctattacttattttattatttttcaccatatagatcaatcattagatcatcaaaatatgtttcaatcatcctaaagagtatggtgaatgactcttcccatctaatttctgaacgttcaccaatgtctctagccactttggcactaatagcgatcattcgcttagcgtcttctatattattaactggttgattcaatctatctagcaatggaccgtcggacagcgtcattctcatgttcttaatcaatgtacatacatcgccgtcatctaccaattcatccaacaacataagctttttaaaatcatcattataataggtttgatcgttgtcatttctccaaagaatatatctaataagtagagtcctcatgattagttaacaactattttttatgttaaatcaattagtacaccgctatgtttaatacttattcatattttagtttttaggattgagaatcaatacaaaaattaatgcatcattaattttagaaatacttagtttccacgtagtcaatgaaacatttgaactcatcgtacaggacgttctcgtacaggacgtaactataaaccggtttatatttgttcaagatagatacaaatccgataactttttttacgaattctacgggatccactttaaaagtgtcataccgggttctttttatttttttaaacagatcaatggtgtgatgttgattaggtcttttacgaatttgatatagaatagcgtttacatatcctccataatggtcaatcgccatttgttcgtatgtcataaattctttaattatatgacactgtgtattatttagttcatccttgttcattgttaggaatctatccaaaatggcaattatactagaactataggtgcgttgtatacacatattgatgtgtctgtttatacaatcaatgctactaccttcgggtaaaattgtagcatcatataccatttctagtactttaggttcattattatccattgcagaggacgtcatgatcgaatcataaaaaaatatattatttttatgttattttgttaaaaataatcatcgaatacttcgtaagatactccttcatgaacataatcagttacaaaacgtttatatgaagtaaagtatctacgatttttacaaaagtccggatgcataagtacaaagtacgcgataaacggaataataatagatttatctagtctatctttttctatagctttcatagttagatacatggtctcagaagtaggattatgtaacatcagcttcgataaaatgactgggttatttagtcttacacattcgctcatacatgtatgaccgttaactacagagtctacactaaaatgattgaacaatagatagtctaccattgtttcgtattcagatagtacagcgtagtacatggcatcttcacaaattatatcattgtctaatagatatttgacgcatcttatggatcccacttcaacagccatcttaaaatcggtagaatcatattgctttcctttatcattaataatttctagaacatcatctctatcataaaagatacaaatattaactgtttgatccgtaataacattgctagtcgatagcaatttgttaataagatgcgctgggctcaatgtcttaataagaagtgtaagaggactatctccgaatttgttttgtttattaacatccgttgatggaagtaaaagatctataatgtctacattcttgactgttttagagcatacaatatggagaggtgtatttccatcatgatctggttttgagggactaattcctagtttcatcatccatgagattgtagaagcttttggattgtctgacataagatgtctatgaatatgatttttgccaaatttatccactatcctggcttcgaatccgatggacattatttttttaaacactctttctgaaggatctgtacacgccaacaacggaccacatccttcttcatcaaccgagttgttaatcttggctccatactgtaccaataaatttattctctctatgacttcatcatctgttcccgagagataatatagaggcgttttatgctgtttatcacacgcgtttggatctgcgccgtgcgtcagcagcatcgcgactattctattattattaattttagaagctatatgcaatggataatttccatcatcatccgtctcatttggagagtatcctctatgaagaagttcttcgacaaatcgttcatctagtcctttaattccacaatacgcatgtagaatgtgataattatttccagaaggttcgatagcttgtagcatattcctaaatacatctaaatttttactattatatttggcataaagagatagataatactcggccgacataatgttgtccattgtagtataaaaattaatatttctatttctgtatatttgcaacaatttactctctataacaaatatcataacttagttcttttatgtcaagaaggcactggtttagttcatctataaatgtcacgccataactaccacgcatgccatactcagaattatgataaagatatttatccttggggtgtaggtaatggggattaatctttgttggatcagtctctaagttaacacatgtcacacatgatccatttatagttatatcacacgatgatgatttatgaattgattccggaagatcgctatcgtattttgtggttccacaattcatttccatacatgttattgtcacactaatattatgatgaactttatctagccgctgagtggtaaacaacagaacagatagtttattatctttaccaacaccctcagccgctgccacaaatctctgatccgtatccatgatggtcatgtttatttctagtccgtatccagtcaacactatgttagcatttctgtcgatatagctttcactcatatgacactcaccaataatagtagaattaatgtcgtaatttacaccaatagtgagttcggcggcaaagtaccaataccggtaatcttgtcgaggaggacatatagtattcttgtattctaccgaatacccgagagatgcgatacaaaagagcaagactaatttgtaaaccatcttactcaaaatatgtaacaatagtacgatgcaatgagtaagacaataggaaatctatcttatatacacataattattctatcaattttaccaattagttagtgtaatgttaacaaaaatgtgggagaatctaattagtttttctttacacaattgacgtacatgagtctgagttccttgtttttgctaattatttcatccaatttattattcttgacgatatcgagatcttttgtataggagtcaaacttgtattcaacatgcttttctataatcattttagctatttcggcatcatccaatagtacattttccagattagcagaatagatattaatgtcgtatttgaacagagcctgtaacatctcaatgtctttattatctatagccaatttaatgtccggaatgaagagaagggaattattggtgtttgtcgacgtcatatagtcgagcaagagaatcatcatatccacgtgtccattttttatagtgatgtgaatacaactaaggagaatagccagatcaaaagtagatggtatctctgaaagaaagtaggaaacaatacttacatcattaagcatgacggcatgataaaatgaagttttccatccagttttcccatagaacatcagtctccaatttttcttaacaaacagttttaccgtttgcatgttaccactatcaaccgcataatacaatgcggtgtttcccttgtcatcaaattgtgaatcatccagtccactgaatagcaaaatctttactattttggtatcttccaatgtggctgcctgatgtaatggaaattcattctctagaagatttttcaatgctccagcgttcaacaacgtacatactagacgcacgttattatcagctattgcataatacaaggcactatgtccatggacatccgccttaaatgtatctttactagagagaaagcttttcagctgcttagacttccaagtattaattcgtgacagatccatgtctgaaacgagacgctaattagtgtatattttttcattttttataattttgtcatattgcaccagaattaataatatctttaatagatctgattagtagatacatggctatcgcaaaacaacatatacacatttaataaaaataatatttattaagaaaattcagatttcacgtacccatcaatataaataaaataatgattccttacaccgtacccatattaaggagattccaccttacccataaacaatataaatccagtaatatcatgtctgatgatgaacacaaatggtgtattaaattccagtttttcaggagatgatctcgccgtagctaccataatagtagatgcctctgctacagttccttgttcgtcgacatctatctttgcattctgaaacattttataaatatataatgggtccctagtcatatgtttaaacgacgcattatctggattaaacatactaggagccatcatttcggctatcgacttaatatccctcttattttcgatagaaaatttagggagtttaagattgtacactttattccctaattgagacgaccaatagtctaattttgcagccgtgatagaatctgtgaaatgggtcatattatcacctattgccaggtacatactaatattagcatccttatacggaaggcgtaccatgtcatattctttgtcatcgattgtgattgtatttccttgcaatttagtaactacgttcatcatgggaaccgttttcgtaccgtacttattagtaaaactagcattgcgtgttttagtgatatcaaacggatattgccatatacctttaaaatatatagtattaatgattgcccatagagtattattgtcgagcatattagaatctactacattagacataccggatctacgttctactatagaattaattttattaaccgcatctcgtctaaagtttaatctatataggccgaatctatgatattgttgataatacgacggtttaatgcacacagtattatctacgaaactttgataagttagatcagtgtacgtatatttagatgttttcagcttagctaatcctgatattaattctgtaaatgctggacccagatctctttttctcaaatccatagtcttcaataattctattctagtattacctgatgcaggcaatagcgacataaacatagaaaacgaataaccaaacggtgagaagacaatattatcatcttgaatatttttatacgctactataccggcattggtaaatccttgtagacgataggcggacgctgaacacgctaacgatagtatcaataacgcaatcatgattttatggtattaataattaaccttatttttatgttcggtataaaaaaattattgatgtctacacatccttttgtaattgacatctatatatccttttgtataatcaactctaatcactttaacttttacagttttccctaccagtttatccctatattcaacatatctatccatatgcatcttaacactctctgccaagatagcttcagagtgaggatagtcaaaaagataaatatatagagcataatcattctcgtatactctgccctttattacatcacccgcattgggcaacgaataacaaaatgcaagcatcttgttaacgggctcgtaaattgggataaaaattatgtttttattgtcttatatctattttattcaagagaatattcaggaatttctttttccggttgtatctcgtcgcagtatatatcatttgtacattgtttcatattttttaatagtttacaccttttagtaggactagtatcgtacaattcatagctgtattttgaattccaatcacgcataaaaatatcttccaattgttgacgaagacctaatccatcatccggtgtaatattaatagatgctccacatgtatccgtaaagtaatttcctgtccaatttgaggtacctatataggccgttttatcggttaccatatatttggcatggtttaccctagaatacggaatgggaggatcagcatctggtacaataaatagctttacttctatatttatgtttttagattttagcatagcgatagatcttaaaaagtttctcatgataaacgaagatcgttgccagcaactaatcaatagcttaacggatacttgtctgtctatagcggatcttcttaattcatcttctatataaggccaaaacaaaattttacccgccttcgaataaataatagggataaagttcataacagatacataaacgaatttactcgcatttctaatacatgacaataaagcggttaaatcattggttctttccatagtacatagttgttgcggtgcagaagcaataaatacagagtgtggaacgccgcttacgttaatactaagaggatgatctgtattataatacgacggataaaagtttttccaattatatggtagattgttaactccaagataccagtatacctcaaaaatttgagtgagatccgctgccaagttcctattattgaagatcgcaatacccaattccttgacctgagttagtgatctccaatccatgttagcgcttcctaaataaatatgtgtattatcagatatccaaaattttgtatgaagaactcctcctaggatatttgtaatatctatgtatcgtacttcaactccggccatttgtagtctttcaacatcctttaatggtttgttagatttattaacggctactctaactcgtactcctcttttgggtaattgtacaatctcgtttaatattatcgtgccgaaattcgtacccacttcatccgataaactccaataaaaagatgatatatctagtgtttttgtggtattggatagaatttccctccacatgttaaatgtagacaaatatactttatcaaattgcatacctataggaatagtttctgtaatcactgcgattgtattatccggattcattttatttgttaaaagaataatcctatatcacttcactctattaaaaatccaagtttctatttctttcatgactgattttttaacttcatccgtttccttatgaagatgatgtttggcaccttcataaatttttatttctctattacaatttgcatgttgcatgaaataatatgcacctaaaacatcgctaatcttattgtttgttccctggagtatgagagtcgggggggtgttaatcttggaaattatttttctaaccttgttggtagccttcaagacctgactagcaaatccagccttaattttttcatgattgactaatgggtcgtattggtatttataaactttatccatatctctagatactgattctggacatagctttccgactggcgcatttggtgtgatggttcccataagtttggcagctagcagattcagtcttgaaacagcatctgcattaactagaggagacattagaatcattgctgtaaacaagtttggattatcgtaagaggctagctcccatggaatgacccaataagtagatttaatagttaccacgtgctgtaccaaagtcatcaatcatcattttttcaccattacttcttccatgtccaatatgatcatgtgagaatactaaaattcctaacgatgatatgttttcagctagttcgtcataacgtccagaatgtttaccagctccatgacttatgaatactaatgccttaggatatgtaataggtttccaatatttacaatatatgtaatcattgtccagattgaacatacagtttgcactcatgattcacgttatataactatcaatattaacagttcgtttgatgatcatattatttttatgttttattgataattgtaaaaacatacaattaaatcaatatagaggaaggagacggctactgtcttttgtaagatagtcatggcgactaaattagattatgaggatgctgttttttactttgtggatgatgataaaatatgtagtcgcgactccatcatcgatctaatagatgaatatattacgtggagaaatcatgttatagtgtttaacaaagatattaccagttgtggaagactgtacaaggaattgatgaagttcgatgatgtcgctatacggtactatggtattgataaaattaatgagattgtcgaagctatgagcgaaggagaccactacatcaattttacaaaagtccatgatcaggaaagtttattcgctaccataggaatatgtgctaaaatcactgaacattggggatacaaaaagatttcagaatctagattccaatcattgggaaacattacagatttgatgaccgacgataatataaacatcttgatactttttctagaaaaaaaattgaattgatgatataggggtcttcataacgcataattattacgttagcattctatatccgtgttaaaaaaaattatcctatcatgtatttgagagttttatatgtagcaaacatgatagctgtgatgccaataagctttagatattcacgcgtgctagtgttagggatggtattatctggtggtgaaatgtccgttatataatctacaaaacaatcatcgcatatagtatgcgatagtagagtaaacatttttatagtttttactggattcatacatcgtctacccaattcggttataaatgaaattgtcgccaatcttacacccaaccccttgttatccattagcatagtattaacttcgttatttatgtcataaactgtaaatgattttgtagatgccatatcatacatgatattcatgtccctattataatcattactaactttatcacaatatatgttgataatatctatatatgatctagtctttgtgggcaactgtctatacaagtcgtctaaacgttgtttactcatatagtatctaacagccatcattacatggtcccgttccgttgatagataatcgagtatgttagtggacttgtcaaatctatataccatattttctggaagtggatatacatagtcgtgatcaacattattgctagcctcatcttctatatcctgtactataccattatctatatcatctacataatctatgatattattacacataaacatcgacaacatactattgtttattatctaagtcctgttgatccaaacccttgatctcctctatttgtactatctagagattgtacttcttccagttctggataatatatacgttgatagattagctgagctattctatctccagtatttacattaaacgtacattttccattattaataagaatgactcctatgtttcccctataatcttcgtctattacaccacctcctatatcaatgccttttagtgacagaccagacctaggagctattctaccatagcagaacttaggcatggacatactaatatctgtcttaattaactgtctttctcctggagggatagtataatcgtaagcgctatacaaatcatatccggcagcacccggcgattgcctagtaggagatttagctctgttagtttccttaacaaatctaactggtgagttaatattcatgttgaacataaaactaatattttatttcaaaattatttaccatcccatatattccatgaataagtgtgatgattgtacacttctatagtatctatatacgatccacgataaaatcctcctatcaatagcagtttattatccactatgatcaattctggattatccctcggataaataggatcatctatcagagtccatgtattgctggattcacaataaaattccgcatttctaccaaccaagaataaccttctaccgaacactaacgcgcatgatttataatgaggataataagtggatggtccaaactgccactgatcatgattgggtagcaaatattctgtagttgtatcagtttcagaatgtcctcccattacgtatataacattgtttatggatgccactgctggattacatctaggtttcagaagactcggcatattaacccaagcagcatccccgtggaaccaacgctcaacagatgtgggatttggtagacctcctactacgtataatttattgttagcgggtatcccgctagcatacagtctggggctattcatcggaggaattggaatccaattgtttgatatataatttaccgctatagcattgttatgtatttcattgttcatccatccaccgatgagatatactacttctccaacatgagtacttgtacacatatggaatatatctataatttgatccatgttcataggatactctatgaatggatacttgtatgatttgcgtggttgtttatcacaatgaaatattttggtacagtctagtatccattttacattatttatacctctgggagaaagataatttgacctgattacatttttgataaggagtagcagatttcctaatttatttcttcgctttatataccacttaatgacaaaatcaactacataatcctcatctggaacatttagttcatcgctttctagaataagtttcatagatagataatcaaaattgtctatgatgtcatcttccagttccaaaaagtgtttggcaataaagtttttagtatgacataagagattggatagtccgtattctatacccatcatgtaacactcgacacaatattcctttctaaaatctcgtaagataaagtttatacaagtgtagatgataaattctacagaggttaatatagaagcacgtaataaattgacgacgttatgactatctatatatacctttccagtatacgagtaaataactatagaagttaaactgtgaatgtcaaggtctagacaaaccctcgtaactggatctttatttttcgtgtatttttgacgtaaatgtgtgcgaaagtaaggagataactttttcaatatcgtagaattgactattatattgcctcctatggcatcaataattgttttgaatttcttagtcatagacaatgctaatatattcttacagtacacagtattgacaaatatcggcatttatgtttctttaaaagtcaacatctagagaaaaatgattatctttttgagacataactcccattttttggtattcacccacacgtttttcgaaaaaattagtttttccttccaatgatatattttccatgaaatcaaacggattggtaacattataaatttttttaaatcccaattcagaaatcaatctatccgcgacgaattctatatatgttttcatcatttcacaattcattcctataagtttaactggaagagccgcagtaagaaattcttgttcaatggatactgcatctgttataatagatctaacggtttcttcactcggtggatgcaataaatgtttaaacatcaaacatgcgaaatcgcagtgcagaccctcgtctctactaattagttcgttggaaaacgtgagtccgggcattaggccacgctttttaagccaaaatatggaagcgaatgatccggaaaagaagattccttctactgcagcaaaggcaataagtctctctccataaccggcgctgtcatgtatccacttttgagcccaatcggccttcttttttacacaaggcatcgtttctatggcattaaagagatagtttttttcattactatctttaacataagtatcgatcaaaagactatacatttccgaatgaatgttttcaatggccatctgaaatccgtagaaacatctagcctcggtaatctgtacttctgtacaaaatcgttccgccaaattttcattcactattccgtcactggctgcaaaaaacgccaatacatgttttataaaatatttttcgtctggtgttagtttattccaatcattgatatctttagatatatctacttcttccactgtccaaaatgatgcctctgcctttttatacatgttccagatgtcatgatattggattgggaaaataacaaatctatttggatttggtgcaaggatgggttccataactaaattaacaataacaataaattttttttcagttatctatatgcctgtacttggattttttgtacatcgatatcgccgcaatcactacaataattacaagtattattgatagcattgttattagtactatcataattaaattatctacattcatgggtgctgaataatcgttattatcatcattatcattttgtaattgtgacatcatactagataaatcgtttgcgagattgttgtgggaagcgggcatggaggatgcattatcattattatttaacgccttccatttggattcacaaatgttacgcacattcaacattttatggaaactataattttgtgaaaacaaataacaagaaaactcgtcatcgttcaaatttttaacgatagtaaaccgattaaacgtcgagctaatttctaacgctagcgactctgttggatatgggtttccagatatatatcttttcagttcccctacgtatctataatcatctgtaggaaatggaagatatttccatttatctactgttcctaatatcatatgtggtggtgtagtagaaccattaagcgcgaaagatgttatttcgcatcgtattttaacttcgcaataatttctggttagataacgcactctaccagtcaagtcaatgatattagcctttacagatatattcatagtagtcgtaacgatgactccatcttttagatgcgatactcctttgtatgtaccagaatcttcgtacctcaaactcgatatatttaaacaagttaatgagatattaacgcgttttatgaatgatgatatataaccagaagttttatcctcggtggctagcgctataaccttatcattataataccaactagtgtgattaatatgtgacacgtcagtgtgggtacaaatatgtacattatcgtctacgtcgtattcgatacatccgcatacagccaacaaatataaaatgacaaatactctaacgacgttcgtacccatcttgatgcggtttaataaatgttttgatttcaatttattgtaaaaaaagattcggttttatactgttcgatattctcattgcttatattttcatctatcatctccacacagtcaaatccgtggttagcatgcacctcatcaaccggtaaaagactatcggactcttctatcattataactctagaatatttaatttggtcattattaatcaagtcaattatcttatttttaacaaacgtgagtattttactcatttttataaaaacttttagaaatatacagactctatcgtgtgtctatatcttctttttatatccaatgtatttatgtctgatttttcttcatttatcatatataatggtccaaattctacacgtgcttcggattcatccagatcattaaggttcttataattgtaacatccttctcttccctcttctacatcttccttcttattcttattcttagcgtcacagaatctaccacagcaggatcccatgacgagcgtcatattaaactaatccattttcaattataatatatgattagtaatgaccattaaaataaaaaatattcttcataaccggcaagaaagtgaaaagttcacattgaaactatgtcagtagtatacatcatgaaatgatgatatatatactctattttggtggaggattatatgatataattcgtggataatcatttttaagacacatttctttattcgtaaatcttttcacgttaaatgagtgtccatattttgcaatttcttcatatgatggcggtgtacgtggacgaggctgctcctgttcttgttgtagtcgccgactgtcgtgtctgcgtttagatccctccattatcgcgattgcgtagatggagtactattttataccttgtaattaaatttttttattaattaaacgtataaaaacgttccgtatctgtatttaagagccagatttcgtctaatagaacaaatagctacagtaaaaataactagaataattgctacacccactagaaaccacggatcgtaatacggcaatcggttttcgataataggtggaacgtatattttatttaaggacttaacaattgtctgtaaaccacaatttgcttccgcggatcctgtattaactatctgtaaaagcatatgttgaccgggcggagccgaacattctccgatatctaatttctgtatatctataatattattaacctccgcatacgcattacagttcttttctagcttggataccgcactaggtacatcgtctagatctattcctatttcctcagcgatagctcttctatccttttccggaagcaatgaaatcacttcaataaatgattcaaccatgagtgtgaaactaagtcgagaattactcatgcatttgttagttattcggagcgcgcaatttttaaactgtcctataacctctcctatatgaatagcacaagtgacattagtagggatagaatgttgagctaatttttgtaaataactatctataaaaagattatacaaagttttaaactctttagtttccgccatttatccagtctgagaaaatgtctctcataataaatttttccaagaaactaattgggtgaagaatggaaacctttaatctatatttatcacagtctgttttggtacacatgatgaattcttccaatgccgtactaaattcgatatctttttcgatttctggatatgtttttaataaagtatgaacaaagaaatggaaatcgtaataccagttatgtttaactttgaaattgttttttattttcttgttaatgattccagccacttgggaaaagtcaaagtcgtttaatgccgatttaatacgttcattaaaaacaaactttttatcctttagatgaattattattggttcattggaatcaaaaagtaagatattatcgggtttaagatctgcgtgtaaaaagttgtcgcaacagggtagttcgtagattttaatgtataacagagccatctgtaaaaagataaactttatgtattgtaccaaagatttaaatcctaatttgatagctaactcggtatctactttatctgccgaatacagtgctaggggaaaaattataatgtttcctctttcatattcgtagttagttctcttttcatgttcgaaaaagtgaaacatgcggttaaaatagtttataacattaatattactgttaataactgccggataaaagtgggatagtaatttcacgaatttgatactgtcctttctctcgttaaacgcctttaaaaaaactttagaagaatatctcaatgagagttcctgaccatccatagtttgtatcaataatagcaacatatgaagaacacgtttatacagagtatgtaaaaatgttaatttatagtttaatcccatggcccacgcacacacgattaattttttttcatctccctttagattgttgtatagaaatttgggtactgtgaactccgccgtagtttccatgggactatataattttgtggcctcgaatacaaattttactacatagttatctatcttaaagactataccatatcctcctgtagatatgtgataaaaatcgtcgtttataggataaaatcgtttatccttttgttggaaaaaggatgaattaatgtaatcattctcttctatctttagtagtgtttccttattaaaattcttaaaataatttaacaatctaactgacggagcccaattttggtgtaaatctaattgggacattatattgttaaaatacaaacagtctcctaatataacagtatctgataatctatggggagacatccattgatattcaggggatgaatcattggcaacacccatttattgtacaaaaagccccaatttacaaacgaaagtccaggtttgatagagacaaacaattaactattttgtctctgtttttaacacctccacagtttttaatttctttagtaatgaaattattcacaatatcagtatcttctttatctaccagagattttactaacttgataaccttggctgtctcattcaatagggtagtaatatttgtatgtgtgatattgatatctttttgaattgtttcttttagaagtgattctttgatggtgccagcatacgaattacaataatgcagaaactcggttaacatgcaggaattatagtaagccaattccaattgttgcctgtgttgtattagagtgtcaatatgagcaatggtgtccttgcgtttctctgatagaatgcgagcagcgattttggcgttatcatttgacgatatttctggaatgacgaatcctgtttctactaactttttggtaggacaaagtgaaacaatcaagaagatagcttctcctcctatttgtggaagaaattgaactcctctagatgatctactgacgatagtatctccttgacagatattggaccgaattacagaagtacctggaatgtaaagccctgaaaccccctcattttttaagcagattgttgccgtaaatcctgcactatgcccaagatagagagctcctttggtgaatccatctctatgtttcagtttaaccaagaaacagtcagctggtctaaaatttccatctctatctaatacagcatctaacttgatgtcaggaactatgaccggtttaatgttatatgtaacattgagtaaatccttaagttcataatcatcactgtcatcagttatgtacgatccaaacaatgtttctaccggcatagtggatacgaagatgctatccatcagaatgtttccctgattagtattttctatatagctattcttctttaaacgattttccaaatcagtaactatgttcatttttttaggagtaggacgcctagccagtatggaagaggattttctagatcctctcttcaacatctttgatctcgatggaatgcaaaaccccatagtgaaacaaccaacgataaaaataatattgtttttcactttttataattttaccatctgactcatggattcattaatatctttataagagctactaacgtataattctttataactgaactgagatatatacaccggatctatggtttccataattgagtaaatgaatgctcggcaataactaatggcaaatgtatagaacaacgaaattatactagagttgttaaagttaatattttctatgagctgttccaataaattatttgttgtgactgcgttcaagtcataaatcatcttgatactatccagtaaaccgtttttaagttctggaatattatcatcccattgtaaagcccctaattcgactatcgaatatcctgctctgatagcagtttcaatatcgacggacgtcaatactgtaataaaggtggtagtattgtcatcatcgtgataaactacgggaatatggtcgttagtaggtacggtaactttacacaacgcgatatataactttccttttgtaccatttttaacgtagttgggacgtcctgcagggtattgttttgaagaaatgatatcgagaacagatttgatacgatatttgttggattcctgattattcactataatataatctagacagatagatgattcgataaatagagaaggtatatcgttggtaggataatacatccccattccagtattctcggatactctattgatgacactagttaagaacatgtcttctattctagaaaacgaaaacatcctacatggactcattaaaacttctaacgctcctgattgtgtctcgaatgcctcgtacaaggatttcaaggatgccatagattctttgaccaacgatttagaattgcgtttagcatctgatttttttattaaatcgaatggtcggctctctggtttgctaccccaatgataacaatagtcttgtaaagataaaccgcaagaaaatttatacgcatccatccaaataaccctagcaccatcggatgatattaatgtattattatagattttccatccacagttattgggccagtatactgttagcaacggtatatcgaatagattactcatgtaacctactagaatgatagttcgtgtactagtcataatatctttaatccaatctaagaaatttaaaattagattttttacactgttaaagttaacaaaagtattacccgggtacgtggatatcatatatggcattggtccattatcagtaatagctccataaactgatacggcgatggtttttatatgtgtttgatctaacgaggaagaaattcgcgcccacaattcatctctagatatgtatttaatatcaaacggtaacacatcaatttcgggacgcgtatatgtttctaaatttttaatccaaatataatgatgacctatatgccctattatcatactgtcaactatagtacacctagggaacttacgatacatctgtttcctataatcgttaaattttacaaatctataacatgctaaaccttttgacgacaaccattcattaatttctgatatggaatctgtattctcgataccgtatcgttctaaagccagtgctatatctccctgttcgtgggaacgctttcgtataatatcgatcaacggataatctgaagtttttggagaataatatgactcatgatctatttcgtccataaacaatctagacataggaattggaggcgatgatcttaattttgtgcaatgagtcgtcaatcctataacttctaatcttgtaatattcatcatcgacataatactatctatgttatcatcgtatattagtataccatgaccttcttcatttcgtgccaaaatgatatacagtcttaaataattacgcaatatctcaatagtttcataattgttagctgttttcatcaaggtttgtatcctgtttaacatgatggcgttctataacgtctctattttctatttttaattttttaaatttttaacgatttactgtggctagatacccaatctctctcaaatatttttttagcctcgcttacaagctgtttatctatactattaaaactgacgaatccgtgattttggtaatgggttccgtcgaaatttgccgaagtgatatgaacatattcgtcgtcgactatcaacaattttgtattattctgaatagtgaaaaccttcacagatagatcattttgaacacacaacgcatctagacttttggcggttgccatagaatatacgtcgttcttatcccaattaccaactagaagtctgatcttaactcctctattaatggctgcttctataatggagttgtaaatgtcgggccaatagtagctattaccgtcgacacgtgtagtgggaactatggccaaatgttcaatatctatactagtcttagctgacctgagtttatcaataactacatcggtatctagatctctagaatatcccaataggtgttccggagaatcagtaaagaacactccacctataggattcttaatatgatacgcagtgctaactggcaaacaacaagccgcagagcataaattcaaccatgaattttttgcgctattaaaggctttaaaagtatcaaatcttctacgaagatctgtggccagcgggggataatcagaatatacacctaacgttttaatcgtatgtatagatcctccagtaaatgacgcgtttcctacataacatctttcatcatctgacacccaaaaacaaccgagtagtagtcccacattattttttttatctatattaacggttataaaatttatatccgggcagtgactttgtagctctcccagatttcttttccctcgttcatctagcaaaactattattttaatccctttttcagatgcctcttttagtttatcaaaaataagcgctcccctagtcgtactcagaggattacaacaaaaagatgctatgtatatatatttcttagctagagtgataatttcgttaaaacattcaaatgttgttaaatgatcggatctaaaatccatattttctggtagtgtttctaccagcctacattttgctcccgcaggtaccgatgcaaatggccacatttagttaacataaaaacttatacatcctgttctatcaacgattctagaatatcatcggctatatcgctaaaattttcatcaaagtcgacatcacaacctaactcagtcaatatattaagaagttccatgatgtcatcttcgtctatttctatatccgtatccattgtagattgttgaccgattatcgagtttaaatcattactaatactcaatccttcagaatacaatctgtgtttcattgtaaatttataggcggtgtatttaagttggtagattttcaattatgtattaatatagcaacagtagttcttgctcctccttgattctagcatcctcttcattattttcttctacgtacataaacatgtccaatacgttagacaacacaccgacgatggcggccgctacagacacgaatatgactaaaccgatgaccatttaaaaacccctctctagctttcacttaaactgtatcgatcattcttttagcacatgtataatataaaaacattattctatttcgaatttaggcttccaaaaatttttcatccgtaaaccgataataatatatatagacttgttaatagtcggaataaatagattaatgcttaaactatcatcatctccacgattagagatacaatatttacattctttttgctgtttcgaaactttatcaatacacgttaatacaaacccaggaaggagatattgaaactgaggctgttgaaaatgaaacggtgaatacaataattcagataatgtaaaatcatgattccgtattctgatgatattagaactgctaatggatgtcgatggtatgtatctaggagtatctattttaacaaagcatcgatttgctaatatacaattatccttttgattaattgttattttattcatattcttaaaaggtttcatatttatcaattcttctacattaaaaatttccatttttaatttatgtagccccgcaatactcctcattacgtttcattttttgtctataatatccattttgttcatctcggtacatagattatccaattgagaagcgcatttagtagttttgtacattttaagtttattgacgaatcgtcgaaaactagttatagttaacattttattatttgataccctgatattaatacccctgccgttactattatttataactgatgtaatccacgtaacattggaattaactatcgatagtaatgcatcgacgcttccaaaattgtctattataaactcaccgataatttttttattgcatgttttcatattcattaggattatcaaatctttaatcttattacgattgtatgcgttgatattacaagacgtcattctaaaagacggaggatctccatcaaatgccagacaatcacgtacaaagtacatggaaataggttttgttctattgcgcatcatagatttatatagaacacccgtagaaatactaatttgttttactctataaaatactaatgcatctatttcatcgttttgtataacgtctttccaagtgtcaaattccaaatttttttcattgatagtaccaaattcttctatctctttaactacttgcatagataggtaattacagtgatgcctacatgccgttttttgaaactgaatagatgcgtctagaagcgatgctacgctagtcacaatcaccactttcatatttagaatatatatatgtaaaaatatagtagaatttcattttgtttttttctatgctataaatgaattctcattttgcatctgctcatactccgttttatattaataccaaagaaggaagatatctggttctaaaagccgttaaagtatgcgatgttagaactgtagaatgcgaaggaagtaaagcttcctgcgtactcaaagtagataaaccctcatcgcccgcgtgtgagagaagaccttcgtccccgtccagatgcgagagaatgaataaccctggaaaacaagttccgtttatgaggacggacatgctacaaaatatgttcgcggctaatcgcgataatgtagcttctagacttttgtcctaaaatactattatatccttttcgatattaataaatccgtgtcgtccaggttttttatctctttcagtatgtgaatagataggtattttatctctattcatcatcgaatttaagagatccgataaacattgtttgtattctccagatgtcagcatctgatacaacaatatatgtgcacataaacctctggcacttatttcatgtaccttccccttatcactaaggagaatagtatttgagaaatatgtatacatgatattatcatgaattagatatacagaatttgtaacactctcgaaatcacacgatgtgtcggcgttaagatctaatatatcactcgataacacattttcatctagatacactagacattttttaaagctaaaatagtctttagtagtaacagtaactatgcgattattttcatcgatgatacatttcatcggcatattattacgcttaccatcaaagactataccatgtgtatatctaacgtattctagcatggttgccatacgcgcattaaacttttcaggatctttggatagatcttccaatctatctatttgagaaaacatttttatcatgttcaatagttgaaacgtcggatccactatatagatattatctataaagattttaggaactacgttcatggtatcctggcgaatattaaaactatcaatgatatgattatcgttttcatcttttatcaccatatagtttctaagatatgggattttacttaatataatattatttcccgtgataaattttattagaaaggccaaatctataagaaaagtcctagaattagtctgaagaatatctatatcgccgtatagtatatttggattaattagatatagagaatatgatccgtaacatatacaacttttattatggcgtctaagatattcttccatcaacttattaacatttttgactagggaagatacattatgacgtcccattacttttgccttgtctattactgcgacgttcatagaatttagcatatctcttgccaattcttccattgatgttacattataagaaattttagatgaaattacatttggagctttaatagtaagaactcctaatatgtccgtgtatgtggtcactaatacagattgtagttctataatcgtaaataatttacctatattatatgtttgagtctgtttagaaaagtagctaagtatacgatcttttatttctgatgcagatgtatcaacatcggaaaaaaatctttttttattcttttttactaaagatacaaatatgtctttgttaaaaacagttattttctgaatatttctagcttgtaattttaacatatgatattcgttcacactaggtactctgcctaaataggtttctataatctttaatgtaatattaggaagagtattctgatcaggattcctattcattttgaggatttaaaactctgattattgtctaatatggtctctacgcaaactttttcacagagcgatagagtttttgataactcgtttttcttaagaaatataaaactactgtctccagagctcgctctatcttttattttatctaattcgatacaaactcctgatactggttcagaaagtaattcattaattttcagtcctttatagaagatatttaatatagataatacaaaatcttcagtttttgatatcgatctgattgatcctagaactagatatattaataacgtgctcattaggcagtttatggcagcttgataattagatatagtatattccagttcatatttattagataccgcattgcccagattttgatattctatgaattcctctgaaaataaatccaaaataactagacattctattttttgtggattagtgtactctcttccctctatcatgttcactactggtgtccacgatgataaatatctagagggaatataatatagtccataggatgccaatctagcaatgtcgaataactgtaattttattcttcgctcttcattatgaattgattcttgaggtataaacctaacacaaattatattattagacttttcgtatgtaatgtctttcatgttataagtttttaatcctggaatagaatctattttaatgaggcttttaaacgcagagttctccaacgagtcaaagcataatactctgttgtttttcttatatacgatgttacgattttcttctttgaatggaataggtttttgaattagtttataattacaacataatagataaggaagtgtgcaaatagtacgcggaaaaaacataatagctcccctgttttcatccatggttttaagtaaatgatcactggcttctttagtcaatggatattcgaacattaaccgtttcatcatcattggacagaatccatatttcttaatgtaaagagtgatcaaatcattgtgtttattgtaccatcttgttgtaaatgtgtattcggttatcggatctgctcctttttctattaaagtatcgatgtcaatctcgtctaagaattcaactatatcgacatatttcatttgtatacacataaccattactaacgtagaatgtataggaagagatgtaacgggaacagggtttgttgattcgcaaactattctaatacataattcttctgttaatacgtcttgcacgtaatctattatagatgccaagatatctatataattattttgtaagatgatgttaactatgtgatctatataagtagtgtaataattcatgtattttgatatatgttccaactctgtctttgtgatgtctagtttcgtaatatctatagcatcctcaaaaaatatattcgcatatattcccaagtcttcagttctatcttctaaaaaatcttcaacgtatggaatataataatctattttacctcttctgatatcattaatgatatagtttttgacactatcttctgtcaattgattcttattcactatatctaagaaacggatagcgtccctaggacgaactactgccattaatatctctattatagcttctggacataattcatctattataccagaattaatgggaactattccgtatctatctaacatagttttaagaaagtcagaatctaagacttgatgttcatatattggttcatacatgaaatgatctctattgatgatagtgactatttcattctctgaaaattggtaactcattctatatatgctttccttgttgatgaaggatagaatatactcaatagaatttgtaccaacaaactgttctcttatgaatcgtatatcatcatctgaaataatcatgtaaggcatacatttaacaattagagacttgtctcctgttatcaatatactattcttgtgataatttatgtgtgaggcaaatttgtccacgttctttaattttgttatagtagatatcaaatccaatggagctacagttcttggcttaaacagatatagtttttctggaacaaattctacaacattattataaaggactttgggtaaataagtgggatgaaatcctattttaattaatgcgatagccttgtcctcgtgcagatatccaaacgcttttgtgatagtatggcattcattgtctagaaacgctctacgaatatctgtgacagatatcatctttagagaatatactagtcgcgttaatagtactacaatttgtattttttaatctatctcaataaaaaaattaatatgtatgattcaatgtataactaaactactaactgttattgataactagaatcagaatctaatgatgacgtacccaagaagtttatctactgccaatttagctgcattatttttagcatctcgtttagattttccatctgccttatcgaatactcttccgtcgatatctacacaggcataaaatgtaggagagttactaggcccaactgattcaatacgaaaagaccaatctctcttagttatttggcagtactcattaataacggtgacagggttagcatctttccaatcaataatttttttagccggaataacatcatcaaaagacttatgatcctctctcattgatttttcgcgggatacatcatctattatgacgtcagccataacatcagcatccggcttatccgcctccgttgtcataaaccaacgaggaggaatatcgtcggagctgtacaccatagcactacgttgaagatcgtacagagctttattaacttctcgcttctccatattaagttgtctagttagttgtgcagcagtagctccttcgattccaatggttttaatagcctcacacacaatctctgcgttagaacgttcgtcgatatagattttagacatttttagagagaactaacacaaccagcaataaaactgaacctactttatcatttttttattcatcatcctctggtggttcgtcgttcctatcaaatgtagctctgattaacccgtcatctataggtgatgctggttctggagattctggaggagatggattattatctggaagaatctctgttatttccttgttttcatgtatcgattgcgttgtaacattaagattgcgaaatgctctaaatttgggaggcttaaagtgttgtttgcaatctctacacgcgtgtctaactagtggaggttcgtcagctgctctagtttgaatcatcatcggcgtagtattcctacttttacagttaggacacggtgtattgtatttctcgtcgagaacgttaaaataatcgttgtaactcacatcctttattttatctatattgtattctactcctttcttaatgcattttataccgaataagagatagcgaaggaattctttttcggtgccgctagtacccttaatcatatcacatagtgttttatattccaaatttgtggcaatagacggtttatttctatacgatagtttgtttctggaatcctttgagtattctataccaatattattctttgattcgaatttagtttcttcgatattagattttgtattacctatattcttgatgtagtactttgatgatttttccatggcccattctattaagtcttccaagttggcatcatccacatattgtgatagtaattctcggatatcagtagcggctaccgccattgatgtttgttcattggatgagtaactactaatgtatacattttccatttataacacttatgtattaactttgttcatttatattttttcattattatgttgatattaacaaaagtgaatatatatatatgttaataattgtattgtggttatacggctacaattttataatgagtgaaagtcagtgtccgatgatcaatgacgatagctttactctgaaaagaaagtatcaaatcgatagtgcggagtcaacaataaaaatggataagaagaggataaagtttcagaatagagccaaaatggtaaaagaaataaatcagacaataagagcagcacaaactcattacgagacattgaaactaggatacataaaatttaagagaatgattaggactactactctagaagatatagcaccatctattccaaataatcagaaaacttataaactattctcggacatttcagccatcggcaaagcatcacagaatccgagtaagatggtatatgctctgctgctttacatgtttcccaatttgtttggagatgatcatagattcattcgttatagaatgcatccaatgagtaaaatcaaacacaagatcttctctcctttcaaacttaatcttattagaatattagtggaagaaagattctataataatgaatgcagatctaataaatggaaaataattggaacacaagttgataaaatgttgatagctgaatctgataaatatacaatagatgcaaggtataacctaaaacccatgtatagaatcaagggagaatctgaagaagataccctcttcatcaaacagatggtagaacaatgtgtgacatcccaggaattggtggaaaaagtgttgaagatactgtttagagatttgttcaagagtggagaatacaaagcgtacagatacgatgatgatgtagaaaatggattcattggattggatacactaaaattaaacattgttcatgatatagttgaaccatgtatgcctgttcgtaggccagtggctaagatactgtgtaaagaaatggtaaataaatactttgagaatccgctacatattattggtaaaaatcttcaagagtgcattgactttgttagtgaataggcatttcatctttctccaatactaattcaaattgttaaattaataatggatagtataaatagttattagttataagatagtaaaaataattattagaataagagtgtagtatcatagataactctcttctataaaaatggattttattcgtagaaagtatcttatatacacagtagaaaataatatagattttttaaaggatgatacattaagtaaagtaaacaattttaccctcaatcatgtactagctctcaagtatctagttagcaattttcctcaacatgttattactaaggatgtattagctaataccaatttttttgttttcatacatatggtacgatgttgtaaagtgtacgaagcggttttacgacacgcatttgatgcacccacgttgtacgttaaagcattgactaagaattatttatcgtttagtaacgcaatacaatcgtacaaggaaaccgtgcataaactaacacaagatgaaaaatttttagaggttgccgaatacatggacgaattaggagaacttataggcgtaaattatgacttagttcttaatccattatttcacggaggggaacccatcaaagatatggaaatcatttttttaaaactgtttaagaaaacagacttcaaagttgttaaaaaattaagtgttataagattacttatttgggcatacctaagcaagaaagatacaggcatagagtttgcggataatgatagacaagatatatatactctatttcaacaaactggtagaatcgtccatagcaatctaacagaaacgtttagagattatatctttcccggagataagactagctattgggtgtggttaaacgaaagtatagctaatgatgcggatatcgttcttaatagacccgccattaccatgtatgataaaattcttagttatatatactctgagataaaacaaggacgcgttaataaaaacatgcttaagttagtttatatctttgagcctgaaaaagatatcagagaacttctgctagaaatcatatatgatattcctggagatatcctatctattattgatgcaaaaaacgacgattggaaaaaatattttattagtttttataaagctaattttattaacggtaatacatttattagtgatagaacgtttaacgaggacttattcagagttgttgttcaaatagatcccgaatatttcgataatgaacgaattatgtctttattctctacgagtgctgcggacattaaacgatttgatgagttagatattaataacagttatatatctaatataatttatgaggtgaacgatatcacattagatacaatggatgatatgaagaagtgtcaaatctttaacgaggatacgtcgtattatgttaaggaatacaatacatacctgtttttgcacgagtcggatcccatggtcatagagaacggaatactaaagaaactgtcatctataaaatccaagagtagacggctgaacttgtttagcaaaaacattttaaaatattatttagacggacaattggctcgtctaggtcttgtgttagatgattataaaggagacttgttagttaaaatgataaaccatcttaagtctgtggaggatgtatccgcattcgttcgattttctacagataaaaaccctagtattcttccatcgctaatcaaaactattttagctagttataatatttccatcatcgtcttatttcaaaggtttttgagagataatctatatcatgtagaagaattcttggataaaagcatccatctaaccaagacggataagaaatatatacttcaattgataagacacggtagatcatagaacagaccaaatatattattaataatttgtatatacatagatataattatcacacatttttgataaatgggaactgctgcaacaattcagactcccaccaaattaatgaataaagaaaatgcagaaatgattttggaaaaaattgttgatcatatagttatgtatattagtgacgaatcaagtgattcagaaaataatcctgaatatattgattttcgtaacagatacgaagactatagatctctcattataaaaagtgatcacgagtttgtaaagctatgtaaaaatcatgcggagaaaagttctccagaaacgcaacaaatgattatcaaacacatatacgaacaatatcttattccagtatctgaagtactattaaaacctataatgtccatgggtgacataattacatataacggatgtaaagacaatgaatggatgctagaacaactctctaccctaaactttaacaatctccgcacatggaactcatgtagcataggcaatgtaacgcgtctgttttatacattttttagttatctgatgaaagataaactaaatatataagtataatcccattctaatactttaacctgatgtattacctgcatcttattagaatattaacctaactaaaagacataacataaaaactcattacatagttgataaaaagcggtaggatataaatattatggctgccaccgttccgcgttttgacgacgtgtacaaaaatgcacaaagaagaattctagatcaagaaacattttttagtagaggtctaagtagaccgttaatgaaaaacacatatctatttgataattacgcgtatggatggataccagaaactgcaatttggagtagtagatacgcaaacttagatgcaagtgactattatcccatttcgttgggattacttaaaaagttcgagtttctcatgtctctatataaaggtcctattccagtatacgaagaaaaagtaaatactgaattcattgctaatggatctttctccggtagatacgtatcatatcttagaaagttttctgctcttccaacaaacgagtttattagttttttgttactgacttccattccaatctataatatcttgttctggtttaaaaatactcagtttgatattactaaacacacattattcagatacgtctatacagataatgccaaacacctggcgttggctaggtatatgtatcaaacaggagactataagcctttgtttagtcgtctcaaagagaattatatatttaccggtcccgttccaatatgtatcaaagatatagatcaccctaatcttagtagagcaagaagtccatccgattatgagacattagctaatattagtactatattgtactttaccaagtatgatccggtattaatgtttttattgttttacgtacctgggtattcaattactacaaaaattactccagccgtagaatatctaatggataaactgaatctaacaaagagcgacgtacaactgttgtaaattattttatgcttcgtaaaatgtaggttttgaaccaaacattctttcaaagaatgagatgcataaaactttattatccaatagattgactatttcggacgtcaatcgtttaaagtaaacttcgtaaaatattctttgatcactgccgagtttaaaacttctatcgataattgtttcatatgttttaatatttacaagttttttggtccatggtccattaggacaaatatatgcaaaataatatcgttctccaagttctatagtctctggattatttttattatattcagtaaccaaatacatattagggttatctgcggatttataatttgagtgatgcattcgactcaacataaataattctagaggagacgatctactatcaaattcggatcgtaaatctgtttctaaagaacggagaatatctatacatacctgattagaattcatccgtccttcagacaacatctcagacagtctggttttgtacatcttaatcatattcttatgaaacttggaaacatctcttctagtttcactagtacctttattaattctctcaggtacagattttgaattcgacgatgccgagtatttcatcgttgtatatttcttcttcgattgcataatcagattcttatataccgcctcaaactctattttaaaattattaaacaatactctattattaatcagtcgttctaactctttcgctatttctatagacttatctacatcttgactgtctatctctgtaaacacggagtcggtatctccatacacgctacgaaaacgaaatctgtaatctataggcaacgatgttttcacaatcggattaatatctctatcgtccatataaaatggattacttaatggattggcaaaccgtaacataccgttagataactctgctccatttagtaccgattctagatacaagatcattctacgtcctatggatgtgcaactcttagccgaagcgtatgagtatagagcactatttctaaatcccatcagaccatatactgagttggctactatcttgtacgtatattgcatggaatcatagatggccttttcagttgaactggtagcctgttttagcatctttttatatctggctctctctgccaaaaatgttcttaatagtctaggaatggttccttctatcgatctatcgaaaattgctatttcagagatgaggttcggtagtctaggttcacaatgaaccgtaatatatctaggaggtggatatttctgaagcaatagctgattatttatttcttcttccaatctattggtactaacaacgacaccgactaatgtttccggagatagatttccaaagatacacacattaggatacagactgttataatcaaagattaatacattattactaaacattttttgttttggagcaaataccttaccgccttcataaggaaacttttgttttgtttctgatctaactaagatagttttagtttccaacaatagctttaacagtggacccttgatgactgtactcgctctatattcgaataccatggattgaggaagcacatatgttgacgcacccgcgtctgtttttgtttctactccataatactcccacaaatactgacacaaacaagcatcatgaatacagtatctagccatatctaaagctatgtttagattataatccttatacatctgagctaaatcaacgtcatcctttccgaaagataatttatatgtatcattaggtaaagtaggacataatagtacgactttaaatccattttcccaaatatctttacgaattactttacatataatatcctcatcaacagtcacataattacctgtggttaaaacctttgcaaatgcagcggctttgcctttcgcgtctgtagtatcgtcaccgatgaacgtcatttctctaactcctctatttaatactttacccatgcaactgaacgcgttcttggatatagaatccaatttgtacgaatccaatttttcaaatttttgaatgaatgaatatagatcgaaaaatatagttccattattgttattaacgtgaaacgtagtattggccatgccgcctactcccttatgactagactgatttctctcataaatacagagatgtacagcttcctttttgtccggagatctaaagataattttctctcctgttaataactctagacgattagtaatatatctcagatcaaagttatgtccgttaaaggtaacgacgtagtcgaacgttagttccaacaattgtttagctattcgtaacaaaactatttcagaacatagaactagttctcgttcgtaatccatttccattagtgactgtatcctcaaacatcctctatcgacggcttcttgtatttcctgttccgttaacatctcttcattaatgagcgtaaacaataatcgtttaccacttaaatcgatataacagtaacttgtatgcgagattgggttaataaatacagaaggaaacttcttatcgaagtgacactctatatctagaaataagtacgatcttgggatatcgaatctaggtatttttttagcgaaacagttacgtggatcgtcacaatgataacatccattgttaatctttgtcaaatattgctcgtccaacgagtaacatccgtctggagatatcccgttagaaatataaaaccaactaatattgagaaattcatccatggtggcattttgtatgctgcgtttctttggctcttctatcaaccacatatctgcgacggagcattttctatctttaatatctagattataacttattgtctcgtcaatgtctatagttctcatctttcccaacggcctcgcattaaatggaggaggagacaatgactgatatatttcgtccgtcactacgtaataaaagtaatgaggaaatcgtataaatacggtctcaccatttcgacatctggatttcagatataaaaatctgttttcaccgtgactttcaaaccaattaatgcaccgaacatccatttatagaatttagaaatatattttcatttaaatgaatcccaaacattggggaagagccgtatggaccattatttttatagtactttcgcaagcgggtttagacggcaacatagaagcgtgtaaacgaaaactatatactatagttagcactcttccatgtcctgcatgtagacggcacgcgactatcgctatagaggacaataatgtcatgtctagcgatgatctgaattatatttattattttttcatcagattatttaacaatttggcatctgatcccaaatacgcgatcgatgtgacaaaggttaaccctttataaacttaacccattataaaacttatgattagtcacaactgaaataaccgcgtgattattttttggtataattctacacggcatggtttctgtgactatgaattcaacccccgttacattagtgaaatctttaacaaacagcaagggttcgtcaaagacataaaactcattgtttacaatcgaaatagaccccctatcacacttaaaataaaaaatatccttatcctttaccaccaaataaaattctgattggtcaatgtgaatgtattcacttaacagttccacaaatttatttattaactccgaggcacatacatcgtcggtattttttatggcaaactttactcttccagcatccgtttctaaaaaaatattaacgagttccatttatatcatccaatattattgaaatgacgttgatggacagatgatacaaataagaaggtacggtacctttgtccaccatctcctccaattcatgctctattttgtcattaactttaatgtatgaaaacagtacgccacatgcttccatgacagtgtgtaacactttggatacaaaatgtttgacattagtataattgttcaagactgtcaatctataatagatagtagctataatatattctatgatggtattgaagaagatgacaaccttggcatattgatcatttaacacagacatggtatcaacagatagcttgaatgaaagagaatcagtaattggaataagcgtcttctcgatagagtgtccgtataccaacatgtctgatattttgatgtattccattaaattatttagttttttctttttattctcgttaaacagcatttctgtcaacggaccccaacatcgttgaccgattaagttttgattgatttttccgtgtaaggcgtatctagtcagatcgtatagcctatccaataatccatcatctgtgcgtagatcacatcgtacactttttaattctctatagaagagcgacagacatctggagcaattacagacagcaatttctttattctctacagatgtaagatacttgaagacattcctatgatgatgcagaattttggataacacggtattgatggtatctgttaccataattcctttgatggctgatagtgtcagagcacaagatttccaatctttgacaatttttagcaccattatctttgttttgatatctatatcagacagcatggtgcgtctgacaacacagggattaagacggaaagatgaaatgattctctcaacatcttcaatagataccttgctattttttctggcattatctatatgtgcgagaatatcctctagagaatcagtatcctttttgatgatagtggatctcaatgacatgggacgtctaaaccttcttattctatcaccagattgcatggtgatttgtcttctttcttttatcataatgtaatctctaaattcatcggcaaattgtctatatctaaaatcataatatgagatgtttacctctacaaatatctgttcgtccaatgttaaagtatttacatcagttttgtattccaaattaaacatggcaacggatttaattttatattcctctattaagtcctcgtcgataataacagaatgtagataatcatttaatccatcgtacatggttggaagatgcttgttgacaaaatctttaattgtcttgatgaaggtgggactatatctaacatcttgattaataaaatttataacattgtccataggatactttgtaactagttttatacacatctcttcatcggtaagtttagacagaatatcgtgaacaggtggtatattatattcatcagatatacgaagaacaatgtccaaatctatattgtttaatatattatatagatgtagcgtagctcctacaggaatatctttaactaagtcaatgatttcatcaaccgttagatctattttaaagttaatcatataggcattgatttttaaaaggtatgtagccttgactacattctcattaattaaccattccaagtcactgtgtgtaagaagattatattctatcataagcttgactacatttggtcccgataccattaaagaattcttatgatataaggaaacagattttaggtactcatctactctacaagaattttggagagccttaacgatatcagtgacgtttattatttcaggaggaaaaaacctaacattgagaatatcggaattaatagcttccagatacagtgattttggcaatagtccgtgtaatccataatccagtaacacgagctggtgcttgctagacaccttttcaatgtttaatttttttgaaataagctttgataaagccttcctcgcaaattccggatacatgaacatgttggcgacatgattaagtattgttttttcattatttttatattttctcaacaagttctcaataccccaatagatgatagaatatcacccaatgcgtccatgttgtctatttccaacaggtcgctatatccaccaatagaagtttttccaaaaaagattctaggaacagttctaccaccagtaatttgttcaaaatagtcacgcaattcattttcgggtttaaattctttaatatcgacaatttcatacgctcctcttttgaaactaaacttatttagaatatccagtgcatttctacaaaaaggacatgtatacttgacaaaaattgtcactttgttattggccaacctttgttgtacaaattcctcggccattttaatatttaagtgatataaaactatctcgacttatttaactctttagtcgagatatatggacgcagatagctatatgatagccaactacagaaggcaaacgctataaaaaacataattacgacgagcatatttataaatatttttattcagcattacttgatatagtaatattaggcacagtcaaacattcaaccactctcgatacattaactctctcattttctttaacaaattctgcaatatcttcgtaaaaagattcttgaaactttttagaatatctatcgactctagatgaaatagcgttcgtcaacatactatgttttgtatacataaaggcgcccattttaacagtttctagtgacaaaatgctagcgatcctaggatcctttagaatcacatagattgacgattcgtctctcttagtaactctagtaaaataatcatacaatctagtacgcgaaataatattatccttgacttgaggagatctaaacaatctagttttgagaacatcgataagttcatcgggaatgacatacatactatctttaatagaactcttttcatccagttgaatggattcgtccttaaccaactgattaatgagatcttctattttatcattttccagatgatatgtatgtccattaaagttaaattgtgtagcgcttctttttagtctagcagccaatactttaacatcactaatatcgatatacaaaggagatgatttatctatggtattaagaattcgtttttcgacatccgtcaaaaccaattcctttttgcctgtatcatccagttttccatcctttgtaaagaaattattttctactagactattaataagactgataaggattcctccataattgcacaatccaaactttttcacaaaactagactttacaagatctacaggaatgcgtacttcaggttttttagcttgtgattttttcttttgcggacattttcttgtgaccaactcatctaccatttcattgattttagcagtgaaataagctttcaatgcacgggcactgatactattgaaaacgagttgatcttcaaattccgccatttaagttcaccaaacaacttttaaatacaaatatatcaatagtagtagaataagaactataaaaaaataataattaaccaataccaaccccaacaaccggtattattagttgatgtgactgttttctcatcacttagaacagatttaacaatttctataaagtctgtcaaatcatcttccggagaccccataaatacaccaaatatagcggcgtacaacttatccatttatacattgaatattggcttttctttatcgctatcttcatcatattcatcatcaatatcaacaagtcccagattacgagccagatcttcttctacattttcagtcattgatacacgttcactatctccagagagtccgataacgttagccaccacttctctatcaatgattagtttcttgagcgcgaaagtaatttttgtttccgttccggatctatagaagacgataggtgtgataattgccttggccaattgtctttctcttttactgagtgattctagttcaccttctatagatctgagaatggatgattctccagtcgaaacatattctaccatggatccgtttaatttgttgatgaagatggattcatccttaaatgttttctctgtaatagtttccaccgaaagactatgcaaagaatttggaatgcgttccttgtgcttaatgtttccatagacggcttctagaagttgatacaacataggactagccgcggtaacttttatttttagaaagtatccatcgcttctatcttgtttagatttatttttataaagtttagtctctccttccaacataataaaagtggaagtcatttgactagataaactatcagtaagttttatagagatagacgaacaattagcgtattgagaagcatttagtgtaacgtattcgatacattttgcattagatttactaatcgattttgcatactctataacacccgcacaagtctgtagagaatcgctagatgcagtaggtcttggtgaagtttcaactctcttcttgattaccttactcatgattaaacctaaataattgtactttgtaatataatgatatatattttcactttatctcatttgagaataaaaatgtttttgtttaaccactgcatgatgtacagatttcggaatcgcaaaccaccagtggttttattttatccttgtccaatgtgaattgaatgggagcggatgcgggtttcgtacgtagatagtacattcccgtttttagaccgagactccatccgtaaaaatgcatactcgttagtttggaataactcggatctgctatatggatattcatagattgactttgatcgatgaaggctcccctgtctgcagccatttttatgatcgtcttttgtggaatttcccaaatagttttataaactcgcttaatatcttctggaaggtttgtattctgaatggatccaccatctgccataatcctattcttgatctcatcattccataattttctctcggttaaaactctaaggagatgcggattaactacttgaaattctccagacaatactctccgagtgtaaatattactggtatacggttccaccgactcattatttcccaaaatttgagcagttgatgcagtcggcataggtgccaccaataaactatttctaagaccgtatgttctgattttatcttttagaggttcccaattccaaagatccgacggtacaacattccaaagatcatattgtagaataccgttactggcgtacgatcctacatatgtatcgtatggtccttccttctcagctagttcacaactcgcctctaatgcaccgtaataaatggtttcgaagatcttcttatttagatcttgtgcttccaggctatcaaatggataatttaagagaataaacgcgtccgctaatccttgaacaccaataccgataggtctatgtctcttattagagatttcagcttctggaataggataataattaatatctataattttattgagatttctgacaattactttgaccacatccttcagtttgagaaaatcaaatcgcccatctattacaaacatgttcaaggcaacagatgccagattacaaacggctacctcattagcatccgcatattgtattatctcagtgcaaagattactacacttgatagttcctaaattttgttgattactctttttgttacacgcatccttataaagaatgaatggagtaccagtttcaatctgagattctataatcgctttccagacgactcgagcctttattatagatttgtatctcctttctctttcgtatagtgtatacaatcgttcgaactcgtctccccaaacattgtccaatccaggacattcatccggacacatcaacgaccactctccgtcatccttcactcgtttcataaagagatcaggaatccaaagagctataaatagatctctggttctatgttcctcgtttcctgtattctttttaagatcgaggaacgccataatatcagaatgccacggttccaagtatatggccataactccaggccgtttgtttcctccctgatctatgtatctagcggtgttattataaactctcaacattggaataataccgtttgatataccattggtaccggagatatagcttccactggcacgaatattactaattgatagacctattccccctgccattttagagattaatgcgcatcgttttaacgtgtcatagataccctctatgctatcatcgatcatgttaagtagaaaacagctagacatttggtgacgactagttcccgcattaaataaggtaggagaagcgtgcgtaaaccatttttcagaaagtagattgtacgtctcaatagctgagtctatatcccattgatgaattcctactgcgacacgcattaacatgtgctgaggtctttcaacgatcttgttgtttattttcaacaagtaggatttttccaaagttttaaaaccaaaatagttgtatgaaaagtctcgttcgtaaataataaccgagttgagtttatccttatatttgttaactatatccatggtgatacttgaaataatcggagaatgtttcccatttttaggattaacatagttgaataaatcctccatcacttcactaaatagtttttttgtttccttgtgtagatttgatacggctattctggcggctagaatggcataatccggatgttgtgtagtacaagtggctgctatttcggctgccagagtgtccaattctaccgttgttactccattatatattccttgaataaccttcatagctattttaataggatctatatgatccgtgtttaagccataacataattttctaatacgagacgtgattttatcaaacatgacattttccttgtatccatttcgtttaatgacaaacatttttgttggtgtaataaaaaaattatttaacttttcattaatagggatttgacgtatgtagcgtacaaaatgatcgttcctggtatatagataaagagtcctatatatttgaaaatcgttacggctcgattaaactttaatgattgcatagtgaatatatcattaggatttaactccttgactatcatggcggcgccagaaattaccatcaaaagcattaatacagttatgccgatcgcagttaaaacggttatagcatccaccatttatatctaaaaattagatcaaagaatatgtgacaaagtcctagttgtatactgagaattgacgaaacaatgtttcttacatatttttttcttattagtaactgacttaatagtaggaactggaaagctagacttgattattctataagtatagatacccttccagataatgttctctttgataaaagttccagaaaatgtagaattttttaaaaagttatcttttgctattaccaagattgtgtttagacgcttattattaatatgagtgatgaaatccacaccgcctctagatatcgcctttatttccacattagatggtaaatccaatagtgaaactatctttttaggaatgtatggactcgcgtttagaggagtgaacgtcttgggcgtcggaaaggatgattcgtcaaacgaataaacaatttcacaaatggatgttaatgtattagtaggaaattttttgacgctagtggaattgaagattctaatggatgatgttctacctatttcatccgataacatgttaatttccgacaccaacggttttaatatttcgatgatatacggtagtctctctttcggacttatatagcttattccacaatacgagtcattatatactccaaaaaacaaaataactagtataaaatctgtatcgaatgggaaaaacgaaattatcgacataggtatagaatccggaacattgaacgtattaatacttaattctttttctgtggtaagtaccgataggttattgacattgtatggttttaaatattctataacttgagacttgatagatattagtgatgaattgaaaattatttttatcaccacgtgtgtttcaggatcatcgtcgacgcccgtcaaccaaccgaatggagtaaaataaatatcattaatatatgctctagatattagtatttttattaatcctttgattatcatcttctcgtaggcgaatgattccatgatcaagagtgatttgagaacatcctccggagtattaatgggcttagtaaacagtccatcgttgcaataataaaagttatccaagttaaaggatattatgcattcgtttaaagatatcacctcatctgacggagacaattttttggtaggttttagagactttgaagctacttgtttaacaaagttattcatcgtcgtctactattctatttaattttgtagttaatttatcacatatcacattaattgactttttggtccatttttccatacgtttatattcttttaatcctgcgttatccgtttccgttatatccagggatagatcttgcaagttaaatagaatgctcttaaataatgtcattttcttatccgctaaaaatttaaagaatgtataaacctttttcagagatttgaaactcttaggtggtgtcctagtacacaatatcataaacaaactaataaacattccacattcagattccaacagctgattaacttccacattaatacagcctattttcgctccaaatgtacattcgaaaaatctgaataaaacatcgatgtcacaatttgtattatccaatacagaatgtttgtgattcgtgttaaaaccatcggagaaggaatagaaataaaaattattatagtggtggaattcagttggaatattgcctccggagtcataaaaggatactaaacattgttttttatcataaattacacatttccaatgagacaaataacaaaatccaaacattacaaatctagaggtagaacttttaattttgtctttaagtatatacgataagatatgtttattcataaacgcgtcaaatttttcatgaatcgctaaggagtttaagaatctcatgtcaaattgtcctatataatccacttcggatccataagcaaactgagagactaagttcttaatacttcgattgctcatccaggctcctctctcaggctctattttcatcttgacgacctttggattttcaccagtatgtattcctttacgtgataaatcatcgattttcaaatccatttgtgagaagtctatcgccttagatactttttcccgtagtcgaggtttaaaaaaatacgctaacggtatactagtaggtaactcaaagacatcatatatagaatggtaacgcgtctttaactcgtcggttaactctttcttttgatcgagttcgtcgctactattgggtctgctcaggtgccccgactctactagttccaacatcataccgataggaatacaagacactttgccggcggttgtagatttatcatatttttccactacatatccgttacaatttgttaaaaatttagatacatctatattgctacataatccagctagtgaatatatatgacataataaattggtaaatcctagttctggtattttactaattactaaatctgtatatctttccatttatcatggaaaagaatttaccagatatcttcttttttccaaactgcgttaatgtattctcttacaaatattcacaagatgaattcagtaatatgagtaaaacggaacgtgatagtttctcattggccgtgtttccagttataaaacatagatggcataacgcacacgttgtaaaacataaaggaatatacaaagttagtacagaagcacgtggaaaaaaagtatctcctccatcactaggaaaacccgcacacataaacctaaccgcgaagcaatatatatacagtgaacacacaataagctttgaatgttatagttttctaaaatgtataacaaatacagaaatcaattcgttcgatgagtatatattaagaggactattagaagctggtaatagtttacagatattttccaattccgtaggtaaacgaacagatactataggtgtactagggaataagtatccatttagcaaaattccattggcctcattaactcctaaagcacaacgagagatattttcagcgtggatttctcatagacctgtagttttaactggaggaactggagtgggtaagacgtcacaggtacccaagttattgctttggtttaattatttatttggtggattctctactctagataaaatcactgactttcacgaaagaccagtcattctatctcttcctaggatagctttagttagattgcatagcaataccattttaaaatcattgggatttaaggtactagatggatctcctatttctttacggtacggatctataccggaagaattaataaacaaacaaccaaaaaaatatggaattgtattttctacccataagttatctctaacaaaactatttagttatggcactcttattatagacgaagttcatgagcatgatcaaataggagatattattatagcagtagcgagaaagcatcatacgaaaatagattctatgtttttaatgactgccacgttagaggatgacagggaacggctaaaagtatttttacctaatcccgcatttatacatattcctggagatacactgtttaaaattagcgaggtatttattcataataagataaatccatcttccagaatggcatacatagaagaagaaaagagaaatttagttactgctatacagatgtatactcctcctgatggatcatccggtatagtctttgtggcatccgttgcacagtgtcacgaatataaatcatatttagaaaaaagattaccgtatgatatgtatattattcatggtaaggtcttagatatagacgaaatattagaaaaagtgtattcatcacctaatgtatcgataattatttctactccttatttggaatccagcgttactatacgcaatgttacacacatttatgatatgggtagagtttttgtccccgctccttttggaggatcgcaacaatttatttctaaatctatgagagatcaacgaaaaggaagagtaggaagagttaatcctggtacatacgtctatttctatgatctgtcttatatgaagtctatacagcgaatagattcagaatttctacataattatatattgtacgctaataagtttaatctaacactccccgaagatttgtttataatccctacaaatttggatattctatggcgtacaaaggaatatatagactcgttcgatattagtacagaaacatggaataaattattatccaattattatatgaagatgatagagtatgctaaactttatgtactaagtcctattctcgctgaggagttggataactttgagaggacgggagaattaactagtattgtacgagaagccattttatctctaaatttacaaattaagattttaaattttaaacataaagatgatgatacgtatatacacttttgtaaaatattattcggtgtctataacggaacaaacgctactatatattatcatagacctctaacgggatatatgaatatgatttcagatactatatttgttcctgtagataataactaaaaattaaactctaatgaccacatctttttttagagatgaaaaattttccacatctccttttgtagacacgactaaacattttgcagaaaaaagtttattagtgtttagataatcgtatacttcatcagtgtagatagtaaatgtgaacagataaaaggtattcttgctcaatagattggtaaattccatagaatatattaatcctttcttcttgagatcccacatcatttcaaccagagacgttttatccaatgatttacctcgtactataccacatacaaaactagattttgcagtgacgtcgtacctggtattcctaccaaacaaaattttacttttagttcttttagaaaattctaaggtagaatctctatttgccaatatgtcatctatggaattaccactagcaaaaaatgatagaaatatatattgatacatcgcagctggttttgatctactatactttaaaaacgaatcagattccataattgcctgtatatcatcagctgaaaaactatgttttacacgtattccttcggcatttctttttaatgatatatcttgtttagacaatgataaagttatcatgtccatgagagacgcgtctccgtatcgtataaatatttcattagatgttagacgcttcattaggggtatacttctataaggtttcttaatcagtccatcattggttgcgtcaagaactactatcggatgttgttgggtatctctagtgttacacatggccttactaaagtttgggtaaataactatgatatctctattaattatagatgcatatatttcattcgtcaaggatattagtatcgacttgctatcgtcattaatacgtgtaatgtaatcatataaatcatgcgatagccaaggaaaatttaaatagatgttcatcatataatcgtcgctataattcatattaatacgttgacattgactaatttgtaatatagcctcgccacgaagaaagctctcgtattcagtttcatcgataaaggataccgttaaatataactggttgccgatagtctcatagtctattaagtggtaagtttcgtacaaatacagaatccctaaaatattatctaatgttggattaatctttaccataactgtataaaatggagacggagtcataactattttaccgtttgtacttactggaatagatgaaggaataatctccggacatgctggtaaagacccaaatgtctgtttgaagaaatccaatgttccaggtcctaatctcttaacaaaaattacgatattcgatcccgatatcctttgcattctatttaccagcatatcacgaactatattaagattatctatcatgtctattctcccaccgttatataaatcgcctccgctaagaaacgttagtatatccatacaatggaatacttcatttctaaaatagtattcgttttctaattctttaatgtgaaatcgtatactagaaagggaaaaattatctttgagttttccgttagaaaagaaccacgaaactaatgttctgattgcgtccgattccgttgctgaattaatggatttacaccaaaaactcatataacttctagatgtagaagcattcgctaaaaaattagtagaatcaaaggatataagtagatgttccaacaagtgagcaattcccaagatttcatctatatcattctcgaatccgaaattagaaattcccaagtagatatcctttttcatccgatcgttgatgaaaatacgaactttattcggtaagacaatcatttactaaggagtaaaataggaagtaatgttcgtatgtcgttatcatcgtataaattaaaggtgtgttttttaccattaagtgacattataattttaccaatattggaattataatataggtgtatttgcgcactcgcgacggttgatgcatcggtaaatatagctgtatctaatgttctagtcggtatttcatcatttcgctgtctaataatagcgttttctctatctgtttccattacagctgcctgaagtttattggtcggataatatgtaaaataataagaaatacatacgaataacaaaaataaaataagatataataaagatgccatttagagatctaattttgtttaacttgtccaaattcctacttacagaagatgaggaatcgttggagatagtgtcttccttatgtagaggatttgaaatatcttataatgacttgataacttactttccagataggaaataccataaatatatttataaagtatttgaacatgtagatttatcggaggaattaagtatggaattccatgatacaactctgagagatttagtctatcttagattgtacaagtattccaagtgtatacggccgtgttataaattaggagataatctaaaaggcatagttgttataaaggacaggaatatttatattagggaagcaaatgatgacttgatagaatatctcctcaaggaatacactcctcagatttatacatattctaatgagcgcgtccccataactggttcaaaattaattctttgtggattttctcaagttacatttatggcgtatacaacgtcgcatataacaacaaataaaaaggtagatgttctcgtttccaaaaaatgtatagatgaactagtcgatccaataaattatcaaatacttcaaaatttatttgataaaggaagcggaacaataaacaaaatactcaggaagatattttattcggtaacaggtggccaaactccataggtagctttttctatttcggattttagaatttccaaattcaccagcgatttatcggttttggtgaaatccaaggatttattaatgtccacaaatgccatttgttttgtctgtggattgtatttgaaaatggaaacgatgtagttagatagatgcgctgcgaagtttcctattagggttccgcgcttcacgtcacccagcatacttgaatcaccatcctttaaaaaaaatgataagatatcaacatggagtatatcatactcggattttaattcttctactgcatcactgacattttcacaaatactacaatacggtttaccgaaaataatcagtacgttcttcatttatgggtatcaaaaacttaaaatcgttactgctggaaaataaatcactgacgatattagatgataatttatacaaagtatacaatggaatatttgtggatacaatgagtatttatatagccgtcgccaattgtgtcagaaacttagaagagttaactacggtattcataaaatacgtaaacggatgggtaaaaaagggagggcatgtaaccctttttatcgatagaggaagtataaaaattaaacaagacgttagagacaagagacgtaaatattctaaattaaccaaggacagaaaaatgttagaattagaaaagtgtacatccgaaatacaaaatgttaccggatttatggaagaagaaataaaggcagaaatgcaattaaaaatcgataaactcacatttcaaatatatttatctgattctgataacataaaaatatcattgaatgagatactaacacatttcaacaataatgagaatgttacattattttattgtgatgaacgagacgcagaattcgttatgtgtctcgaggctaaaacacatttctctaccacaggagaatggccgttgataataagtaccgatcaggatactatgctatttgcatctgctgataatcatcctaagatgataaaaaacttaactcaactgtttaaatttgttccctcggcagaggataactatttagcaaaattaacggcgttagtgaatggatgtgatttctttcctggactctatggggcatctataacacccaccaacttaaacaaaatacaattgtttagtgattttacaatcgataatatagtcactagtttggcaattaaaaattattatagaaagactaactctaccgtagacgtgcgtaatattgttacgtttataaacgattacgctaatttagacgatgtctactcgtatgttcctccttgtcaatgcactgttcaagaatttatattttccgcattagatgaaaaatggaatgaatttaaatcatcttatttagaaagcgttccgttaccctgccaattaatgtacgcgttagaaccacgtaaggagattgatgtttcagaagttaaaactttatcatcttatatagatttcgaaaatactaaatcagatatcgatgttataaaatctatatcctcgatcttcggatattctaacgaaaactgtaacacgatagtattcggcatctataaggataatttactactgagtataaataattcattttactttaacgatagtctgttaataaccaatactaaaagtgataatataataaatataggttactagattaaaaatggtgttccaactcgtgtgctctacgtgcggcaaagatatttctcacgaacgatataaattgattatacgaaaaaaatcattaaaggatgtactcgtcagtgtaaagaacgaatgttgtaggttaaaattatctacacaaatagaacctcaacgtaacttaacagtgcaacctctattggatataaactaatatggatccggttaattttatcaagacatatgcgcctagaggttctattatttttattaattataccatgtcattaacaagtcatttgaatccatcgatagaaaaacatgtgggtatttattatggtacgttattatcggaacacttggtagttgaatctacctatagaaaaggagttcgaatagtcccattggatagtttttttgaaggatatcttagtgcaaaagtatacatgttagagaatattcaagttatgaaaatagcagctgatacgtcattaactttattgggtattccgtatggatttggtcataatagaatgtattgttttaaattggtagctgaatgttataaaaatgccggtattgatacatcgtctaaacgaatattaggtaaagatatttttctgagccaaaacttcacagacgataatagatggataaagatatatgattctaataatttaacattttggcaaattgattaccttaaagggtgagttaatatgcataactactcctccgttgttttttccctcgttctttttcttaacgttgtttgccatcactctcataatgtaaagatattctaaaatggtaaacttttgcatatcggacgcagaaattggtataaatgttgtaattgtattatttcccgtcaatggactagtcacagctccatcagttttatatcctttagagtatttctcactcgtgtctaacattctagagcattccatgatctgtttatcgttgatattggccggaaagatagattttttattttttattatattactattggcaattgtagatataacttctggtaaatatttttctaccttttcaatctcttctattttcaagccggctatatattctgctatattgttgctagtatcaataccttttctggctaagaagtcatatgtggtattcactatatcagttttaactggtagttccattagcctttccacttctgcagaataatcagaaattggttctttaccagaaaatccagctactataataggctcaccgatgatcattggcaaaatcctatattgtaccagattaatgagagcatatttcatttccaataattctgctagttcttgagacattgatttatttgatgaatctagttggttctctagatactctaccatttctgccgcatacaataacttgttagataaaatcagggttatcaaagtgtttagcgtggctagaatagtgggcttgcatgtattaaagaatgcggtagtatgagtaaaccgttttaacgaattatatagtctccagaaatctgtggcgttacatacatgagccgaatgacatcgaagattgtccaatatttttaatagctgctctttgtccattatttctatatttgactcgcaacaattgtagataccattaatcaccgattcctttttcgatgccggacaatagcacaattgtttagctttggactctatgtattcagaattaatagatatatctctcaatacagattgcactatacattttgaaactatgtcaaaaattgtagaacgacgctgttctgcagccatttaactttaaataatttacaaaaatttaaaatgagcatccgtataaaaatcgataaactgcgccaaattgtggcatatttttcagagttcagtgaagaagtgtctataaatgtagactcgacggatgagttaatgtatatttttgccgccttgggcggatctgtaaacatttgggcaattatacctctaagtgcatcagtgttttaccgaggagccgaaaatattgtgtttaatcttcctgtgtccaaggtaaaatcgtgtttgtgtagttttcacaatgatgccatcatagatatagaacctgatctggaaaataatctagtaaaactttctagttatcatgtagtaagtgtcgattgtaacaaggaactgatgcctattaggacagatactactatttgtctaagtatagatcaaaagaaatcttacgtgtttaattttcacaagtatgaagaaaaatgttgtggtagaaccgtcattcatctagaatggttgttgggctttatcaagtgtattagtcagcatcagcatctggctattatgtttaaagatgacaatattattatgaagactcctggtaatactgatgcgttttccagggaatattctatgactgaatgttctcaagaactacaaaagttttctttcaaaatagctatctcgtctctcaacaaactacgaggattcaaaaagagagtcaatgtttttgaaactagaatcgtaatggataatgacgataacattttaggaatgttgttttcggatagagttcaatcctttaagatcaacatctttatggcgtttttagattaatactttcaatgagataaatatgggtggcggagtaagtgttgagctccctaaacgggatccgcctccgggagtacccactgatgagatgttattaaacgtggataaaatgcatgacgtgatagctcccgctaagcttttagaatatgtgcatataggaccactagcaaaagataaagaggataaagtaaagaaaagatatccagagtttagattagtcaacacaggacccggtggtctttcggcattgttaagacaatcgtataatggaaccgcacccaattgctgtcgcacttttaatcgtactcattattggaagaaggatggaaagatatcagataagtatgaagagggtgcagtattagaatcgtgttggccagacgttcacgacactggaaaatgcgatgttgatttattcgactggtgtcagggggatacgttcgatagaaacatatgccatcagtggatcggttcagcctttaataggagtaatagaactgtagagggtcaacaatcgttaataaatctgtataataagatgcaaacattatgtagtaaagatgctagtgtaccaatatgcgaatcatttttgcattatttacgcgcacacaatacagaagatagcaaagagatgatcgattatattctaagacaacagtctgcggactttaaacagaaatatatgagatgtagttatcccactagagataagttagaagagtcattaaaatatgcggaacctcgagaatgttgggatccagagtgttcgaatgccaatgttaatttcttactaacacgtaattataataatttaggactttgcaatattgtacgatgtaataccagcgtgaacaacttacagatggataaaacttcctcattaagattgtcatgtggattaagcaatagtgatagattttctactgttcccgtcaatagagcaaaagtagttcaacataatattaaacactcgttcgacctaaaattgcatttgatcagtttattatctctcttggtaatatggatactaattgtagctatttaaatgggtgccgcggcaagcatacagacgacggtgaatacactcagcgaacgtatctcgtctaaattagaacaagaagcgaacgctagtgctcaaacaaaatgtgatatagaaatcggaaatttttatatccgacaaaaccatggatgtaacctcactgttaaaaatatgtgctctgcggacgcggatgctcagttggatgctgtgttatcagccgctacagaaacatatagtggattaacaccggaacaaaaagcatacgtgccagctatgtttactgctgcgttaaacattcagacgagtgtaaacactgttgttagagattttgaaaattatgtgaaacagacttgtaattctagcgcggtcgtcgataacaaattaaagatacaaaacgtaatcatagatgaatgttacggagccccaggatctccaacaaatttggaatttattaatacaggatctagcaaaggaaattgtgccattaaagcgttgatgcaattgacgactaaggccactactcaaatagcacctagacaagttgctggtacaggagttcagttttatatgattgttatcggtgttataatattggcagcgttgtttatgtactatgccaagcgtatgttgttcacatccaccaatgataaaatcaaacttattttagccaataaggaaaacgtccattggactacttacatggacacattctttagaacttctccgatggttattgctaccacggatatgcaaaactgaaaatatattgataatattttaatagattaacatggaagttatcgctgatcgtctagacgatatagtgaaacaaaatatagcggatgaaaaatttgtagattttgttatacacggtctagagcatcaatgtcctgctatacttcgaccattaattaggttgtttattgatatactattatttgttatagtaatttatatttttacggtacgtctagtaagtagaaattatcaaatgttgttggtggtgctagtcatcacattaactattttttattactttatactataatagtactagactgacttctaacaaacatctcacctgccataaataaatgcttgatattaaagtcttctatttctaacactattccatctgtggaaaataatactctgacattatcgctaattgacacatcggtgagtgatatgcctataaagtaataatcttctttgggcacatataccagtgtaccaggttctaacaacctatttactggtgctcctgtagcatactttttctttaccttgagaatatccatcgtttgcttggtcaatagcgatatgtgattttttatcaaccactcgaaaaagtaattggagtgttcatatcctctacgggctattgtctcatggccgtgtatgaaatttaagtaacacgactgtggtagatttgttctatagagccgattgccgcaaatagatagaactaccaatatgtctgtacaaatgttaaacattaattgattaacagaaaaaacaatgttcgttctgggaatagaaaccagatcaaaacaaaattcgttagaatatatgccacgtttatacatggaatataaaataactacagtttgaaaaataacagtatcatttaaacatttaacttgcggggttaatttcacaactttactgtttttgaactgttcaaaatatagcatcgatccgtgagaaatacgtttagccgcctttaatagaggaaatcccaccgcctttctggatctcaccaacgacgatagttctgaccagcaactcatttcttcatcatccacctgttttaacatataataggcaggagatagatatccgtcattgcaatattccttctcgtaggcacacaatctaatattgataaaatctccattctcttctctgcatttattatcttgtttcggtggctgattaggctgtagtcttggtttaggccttggtctatcgttgttgaatctattttggtcattaaatctttcatttcttcctggtatatttctatcacctcgtttggttggatttttgtctatattatcgtttgtaacatcggtacgggtattcatttatcacaaaaaaaacttctctaaatgagtctactgctagaaaacctcatcgaagaagataccatattttttgcaggaagtatatctgagtatgatgatttacaaatggttattgccggcgcaaaatccaaatttccaagatctatgctttctatttttaatatagtacctagaacgatgtcaaaatatgagttggagttgattcataacgaaaatatcacaggagcaatgtttaccacaatgtataatataagaaacaatttgggtctaggagatgataaactaactattgaagccattgaaaactatttcttggatcctaacaatgaagttatgcctcttattattaataatacggatatgactgccgtcattcctaaaaaaagtggtaggagaaagaataagaacatggttatcttccgtcaaggatcatcacctatcttgtgcattttcgaaactcgtaaaaagattaatatttataaagaaaatatggaatccgcgtcgactgagtatacacctatcggagacaacaaggctttgatatctaaatatgcgggaattaatgtcctgaatgtgtattctccttccacatccataagattgaatgccatttacggattcaccaataaaaataaactagagaaacttagtactaataaggaactagaatcgtatagttctagccctcttcaagaacccattaggttaaatgattttctgggactattggaatgtgttaaaaagaatattcctctaacagatattccgacaaaggattgattactataaatggagaatgttcctaatgtatactttaatcctgtgtttatagagcccacgtttaaacattctttattaagtgtttataaacacagattaatagttttatttgaagtattcgttgtattcattctaatatatgtattttttagatctgaattaaatatgttctttatgcctaaacgaaaaatacccgatcctattgatagattacgacgtgctaatctagcgtgtgaagacgataaattaatgatctatggattaccatggatgacaactcaaacatctgcgttatcaataaatagtaaaccgatagtgtataaagattgtgcaaagcttttgcgatcaataaatggatcacaaccagtatctcttaacgatgttcttcgcagatgatgattcattttttaagtatttggctagtcaagatgatgaatcttcattatctgatatattgcaaatcactcaatatctagactttctgttattattattgatccaatcaaaaaataaattagaagctgtgggtcattgttatgaatctctttcagaggaatacagacaattgacaaaattcacagactttcaagattttaaaaaactgtttaacaaggtccctattgttacagatggaagggtcaaacttaataaaggatatttgttcgactttgtgattagtttgatgcgattcaaaaaagaatcctctctagctaccaccgcaatagatcctgttagatacatagatcctcgtcgtgatatcgcattttctaacgtgatggatatattaaagtcgaataaagtgaacaataattaattctttattgtcatcatgaacggcggacatattcagttgataatcggccccatgttttcaggtaaaagtacagaattaattagacgagttagacgttatcaaatagctcaatataaatgcgtgactataaaatattctaacgataatagatacggaacgggactatggacgcatgataagaataattttgaagcattggaagcaactaaactatgtgatgtcttggaatcaattacagatttctccgtgataggtatcgatgaaggacagttctttccagacattgtttaattctgtgagcgtatggcaaacgaaggaaaaatagttatagtagccgcactcgatgggacatttcaacgtaaaccgtttaataatattttgaatcttattccattatctgaaatggtggtaaaactaactgctgtgtgtatgaaatgctttaaggaggcttccttttctaaacgattgggtgaggaaaccgagatagagataataggaggtaatgatatgtatcaatcggtgtgtagaaagtgttacatcgactcataatattatattttttatctaaaaaactaaaaataaacattgattaaattttaatataatacttaaaaatggatgttgtgtcgttagataaaccgtttatgtattttgaggaaattgataatgagttagattacgaaccagaaagtgcaaatgaggtcgcaaaaaaactgccgtatcaaggacagttaaaactattactaggagaattattttttcttagtaagttacagcgacacggtatattagatggtgccaccgtagtgtatataggatctgctcccggtacacatatacgttatttgagagatcatttctataatttaggagtgatcatcaaatggatgctaattgacggccgccatcatgatcctattttaaatggattgcgtgatgtaactctagtgactcggttcgttgatgaggaatatctacgatccatcaaaaaacaactgcatccttctaagattattttaatttctgatgtaagatccaaacgaggaggaaatgaacctagtacggcggatttactaagtaattacgctctacaaaatgtcatgattagtattttaaaccccgtggcatctagtcttaaatggagatgcccgtttccagatcaatggatcaaggacttttatatcccacacggtaataaaatgttacaaccttttgctccttcatattcagctgaaatgagattattaagtatttataccggtgagaacatgagactgactcgagttaccaaattagacgctgtaaattatgaaaaaaagatgtactaccttaataagatcgtccgtaacaaagtagttgttaactttgattatcctaatcaggaatatgactattttcacatgtactttatgctgaggaccgtgtactgcaataaaacatttcctactactaaagcaaaggtactatttctacaacaatctatatttcgtttcttaaatattccaacaacatcaactgaaaaagttagtcatgaaccaatacaacgtaaaatatctagcaaaaattctatgtctaaaaacagaaatagcaagagatccgtacgcggtaataaatagaaacgtactactgagatatactaccgatatagagtataatgatttagttactttaataaccgttagacataaaattgattctatgaaaactgtgtttcaggtatttaacgaatcatccataaattatactccggttgatgatgattatggagaaccaatcattataacatcgtatcttcaaaaaggtcataacaagtttcctgtaaattttctatacatagatgtggtaatatctgacttatttcctagctttgttagactagatactacagaaactaatatagttaatagtgtactacaaacaggcgatggtaaaaagactcttcgtcttcccaaaatgttagagacggaaatagttgtcaagattctctatcgccctaatataccattaaaaattgttagatttttccgcaataacatggtaactggagtagagatagccgatagatctgttatttcagtcgctgattaatcaattagtagagatgagataagaacattataataattaataatattatcttatatcttatcttatatcttatatcttgtttagaaaaatgctaatattaaaatagctaacgctagtaatccaatcggaagccatttgatatctataatagggtatctaatttcctgatttaaatagcggacagctatattctcggtagctactcgtttggaatcacaaacattatttacatctaatttactatctgtaatggaaacgtttcccaatgaaatggtacaatccgatacattgcattttgttatatttttttttaaagaggctggtaacaacgcatcgcttcgtttacatggctcgtaccaacaataatagggtaatcttgtatctattcctatccgtactatgcttttatcaggataaatacatttacatcgtatatcgtctttgttagcatcacagaatgcataaatttgttcgtccgtcatgataaaaatttaaagtgtaaatataactattatttttatagttgtaataaaaagggaaatttgattgtatactttcggttctttaaaagaaactgacttgataaaaatggctgtaatctctaaggttacgtatagtctatatgatcaaaaagagattaatgctacagatattatcattagtcatgttaaaaatgacgacgatatcggtaccgttaaagatggtagactaggtgctatggatggggcattatgtaaaacttgtgggaaaacggaattggaatgtttcggtcactggggtaaagtaagtatttataaaactcatatagttaagcctgaatttatttcagaaattattcgtttactgaatcatatatgtattcactgcggattattgcgttcacgagaaccgtattccgacgatattaacctaaaagagttatcgggacacgctcttaggagattaaaggataaaatattatccaagaaaaagtcatgttggaacagcgaatgtatgcaaccgtatcaaaaaattactttttcaaagaaaaaggtttgtttcgtcaacaagttggatgatattaacgttcctaattctctcatctatcaaaagttaatttctattcatgaaaagttttggccattattagaaattcatcaatatccagctaacttattttatacagactactttcccatccctccgctgattattagaccggctattagtttttggatagatagtatacccaaagaaaccaatgaattaacttacttattaggtatgatcgttaagaattgtaacttgaatgctgatgaacaggttatccagaaggcggtaatagaatacgatgatattaaaattatttctaataacactaccagtatcaatttatcatatattacatccggcaaaaataatatgattagaagttatatcgtcgcccgacgaaaagatcagaccgctagatctgtaattggtcccagtacatctatcaccgttaatgaggtaggaatgcccgcatatattagaaatacacttacagaaaagatatttgttaatgcctttacagtggataaagttaaacaactattagcgtcaaaccaagttaaattttactttaataaacgattaaaccaattaacaagaatacgccaaggaaagtttattaaaaataaaatacatttattgcctggtgattgggtagaagtagctgttcaagaatatacaagtattatttttggaagacagccgtctctacatagatacaacgtcatcgcttcatctatcagagctaccgaaggagatactatcaaaatatctcccggaattgccaactctcaaaatgctgatttcgacggggatgaggaatggatgatattagaacaaaatcctaaagctgtaattgaacaaagtattcttatgtatccgacgacgttactcaaacacgatattcatggagcccccgtttatggatctattcaagatgaaatcgtagcagcgtattcattgtttaggatacaagatctttgtttagatgaagtattgaacatcttggggaaatatggaagagagttcgatcctaaaggtaaatgtaaattcagcggtaaagatatctatacttacttgataggtgaaaagattaattatccgggtctcttaaaggatggtgaaattattgcaaacgacgtagatagtaattttgttgtggctatgaggcatctgtcattggctggactcttatccgatcataagtcgaacgtggaaggtatcaactttattatcaagtcatcttatgtttttaagagatatctatctatttacggttttggggtgacattcaaagatctgagaccaaattcgacgttcactaataaattggaggccatcaacgtagaaaaaatagaacttatcaaagaagcatacgccaaatatctcaacgatgtaagagacgggaaaatagttccattatctaaagctttagaggcggactatgtggaatccatgttatccaacttgacaaatcttaatatccgagagatagaagaacatatgagacaaacgctgatagataatccagataataacctcctgaaaatggccaaagcgggttataaagtaaatcccacagaactaatgtatattctaggtacgtatggacaacaaaggattgatggtgaaccagcagagactcgagtattgggtagagttttaccttactatcttccagactctaaggatccagaaggaagaggttatattcttaattctttaacaaaaggattaacgggttctcaatattacttttcgatgctggttgcaagatctcaatctactgatatcgtctgtgaaacatcacgtaccggaacactggctagaaaaatcattaaaaagatggaggatatggtggtcgacggatacggacaagtagttataggtaatacgctcatcaagtacgccgccaattataccaaaattctaggctcagtatgtaaacctgtagatcttatctatccagatgagtccatgacttggtatttggaaattagtgctctgtggaataaaataaaacagggattcgtttactctcagaaacagaaacttgcaaagaagacattggcgccgtttaatttcctagtattcgtcaaacccaccactgaggataatgctattaaggttaaggatctgtacgatatgattcataacgtcattgatgatgtgagagagaaatacttctttacggtatctaatatagattttatggagtatatattcttgacgcatcttaatccttctagaattagaattacaaaagaaacggctatcactatctttgaaaagttctatgaaaaactcaattatactctaggtggtggaactcctattggaattatttctgcacaggtattgtctgagaagtttacacaacaagccctgtccagttttcacactactgaaaaaagtggtgccgtcaaacaaaaacttggtttcaacgagtttaataacttgactaatttgagtaagaataagaccgaaattatcactctggtatccgatgatatctctaaacttcaatctgttaagattaatttcgaatttgtatgtttgggagaattaaatccagacatcactcttcgaaaagaaacagataggtatgtagtagatataatagtcaatagattatacatcaagagagcagaaataaccgaattagtcgtcgaatatatgattgaacgatttatctcctttagcgtcattgtaaaggaatggggtatggagacattcattgaggacgaggataatattagatttactgtctatctaaatttcgttgaaccggaagaattgaatcttagtaagtttataatggttcttccgggggcagccaacaagggcaagattagtaaattcaagattcctatctctgactatacgggttatgacgacttcaatcaaacaaaaaagctcaataagatgactgtagaactcatgaatctaaaagaattgggttctttcgatttggaaaacgtcaacgtgtatcctggagtatggaatacatacgatatcttcggtatcgaggccgctcgtgaatacttgtgcgaagccatgttaaacacctatggagaagggttcgattatctgtatcagccttgtgatcttctcgctagtttactatgtgctagttacgaaccagaatcagtgaataaattcaagttcggcgcagctagtactcttaagagagctacgttcggagacaataaagcattgttaaacgcggctcttcataaaaagtcagaacctattaacgataatagtagctgccacttttttagcaaggtccctaatataggaactggatattacaaatactttatcgacttgggtcttctcatgagaatggaaaggaaactatctgataagatatcttctcaaaagatcaaggaaatggaagaaacagaagacttttaattcttatcaataacatatttttctatgatctgtcttttaaacgatggattttccacaaatgcgcctctcaagtccctcatagaatgatacacgtataaaaaatatagcataggcaatgactccttatttttagacattagatatgccaaaatcatagccccgcttctatttactcccgcagcacaatgaaccaacacgggctcgtttcgttgatcacatttagataaaaaggcggttacgtcgtcaaaatatttactaatatcggtagttgtatcatctaccaacggtatatgaataatattaatattagagttaggtaatgtatatttatccatcgtcaaatttaaaacatatttgaacttaacttcagatgatggtgcatccatagcatttttataatttcccaaatacacattattggttacccttgtcattatagtgggagatttggctctgtgcatatctccagttgaacgtagtagtaagtatttatacaaacttttcttatccatttataacgtacaaatggataaaactactttatcggtaaacgcgtgtaatttagaatacgttagagaaaaggctatagtaggcgtacaagcagccaaaacatcaacacttatattctttgttattatattggcaattagtgcgctattactctggtttcagacgtctgataatccagtctttaatgaattaacgagatatatgcgaattaaaaatacggttaacgattggaaatcattaacggatagcaaaacaaaattagaaagtgatagaggtagacttctagccgctggtaaggatgatatattcgacttcaaatgtgtggatttcggcgcctattttatagctatgcgattggataagaaaacatatctgccgcaagctattaggcgaggtactggagacgcgtggatggttaaaaaggcggcaaaggtcgatccatctgctcaacaattttgtcagtatttgataaaacacaagtctaataatgttattacttgtggtaatgagatgttaaatgaattaggttatagcggttattttatgtcaccgcattggtgttccgattttagtaatatggaatagtgttagataaatgcggtaacgaatgttcctgtaaggaaccataacagcttagatttaacgttaaagatgagcataaacataataaacaaaattacaatcaaacttataacattaatatcaaacaatccaaaaaatgaaatcagtggagtagtaaacgcgtacataactcctggataacgtttagcagctgccgttcctattctagaccaaaaatttggtttcatgttttcgaaacggtattctgcaacaagtcggggatcgtgttctacatatttggcggcattatccagtatctgcctattgatcttcatttcgttttcgattctggctatttcaaaataaaatcccgatgatagacctccagactttataatttcatctacgatgttcagcgccgtagtaactctaataatataggctgataagctaacatcataccctcctgtatatgtgaatatggcatgatttttgtccattacaagctcggttttaactttattgcctgtaataatttctctcatctgtaggatatctatttttttgtcatgcattgccttcaagacgggacgaagaaacgtaatatcctcaataacgttatcgttttctacaataactacatattctacctttttattttctaactcggtaaaaaaattagaatcccatagggctaaatgtctagcgatatttcttttcgtttcttctgtacacatagtgttacaaaaccctgaaaagaagtgagtatacttgtcatcatttctaatgtttcctccagtccactgtataaacgcataatccttgtaatgatctggatcatccttgactaccacaacatttcttttttctggcataacttcgttgtcctttacatcatcgaacttctgatcattaatatgctcatgaacattaggaaatgtttctgatggaggtctatcaataactggcacaacaataacaggagttttcaccgccgccatttagttattgaaattaatcatatacaactctttaatacgagttatattttcgtctatccattgtttcacattgacatatttcgacaaaaagatataaaatgcgtattccaatgcttctctgtttaatgaattactaaaatatacaaacacgtcactgtctggcaataaatgatatcttagaatattgtaacaatttattttgtattgcacatgttcgtgatctatgagttcttcttcgaatggcataggatctccgaatctgaaaacgtataaataggagttagaataataatatttgagagtattggtaatatataaactctttagcggtataattagtttttttctctcaatttctatttttagatgtgatggaaaaatgactaattttgtagcattagtatcatgaactctaatcaaaatcttaatatcttcgtcacacgttagctctttgaagtttttaagagatgcatcagttggttctacagatggagtaggtgcaacaattttttgttctacacatgtatgtactggagccattgttttaactataatggtgcttgtatcgaaaaactttaatgcagatagcggaagctcttcgccgcgactttctacatcgtaattgggttctaacgccgatctctgaatggatactagttttctaagttctaatgtgattctctgaaaatgtaaatccaattcctccggcattatagatgtgtatacatcggtaaataaaactatagtatccaacgatcccttctcgcaaattctagtcttaaccaaaaaatcgtatataaccacggagatggcgtatttaagagtggattcttctaccgttttgttcttggatgtcatataagaaactataaagtccgcactactgttaagaatgattactaacgcaactatatagttcaaattaagcattttggaaacataaaataactctgtagacgatacttgactttcgaataagtttgcagacaaacgaagaaagaacagacctctcttaatttcagaagaaaactttttttcgtattcctgacgtctagagtttatatcaataagaaagttaagaattagtcggttaatgttgtatttcattacccaagtttgagatttcataatattatcaaaagacatgataatattaaagataaagcgctgactatgaacgaaatagctatatggttcgctcaaaaatatagtcttgttaaacgtggaaacgataactgtatttttaatcacgtcagcggcatctaaattaaatataggtatatttattccacacactctacaatatgccacaccatcttcataataaataaattcgttagcaaaattattaattttagtgaaatagttagcgtcaactttcatagcttccttcaatctaatttgatgctcacacggtgcgaattccactctaacatcccttttccatgcctcaggttcatcgatctctataatatctagttttttgcgtttcacaaacacaggctcgtctctcgcgatgagatctgtatagtaactatgtaaatgataactagatagaaagatgtagctatatagatgacgatcctttaagagaggtataataactttaccccaatcagatagactgttgttatggtcttcggaaaaagaatttttataaatttttccagtattttccaaatatacgtacttaacatctaaaaaatccttaatgataataggaatggataatccgtctattttataaagaaatacatatcgcacattatacttttttttggaaatgggaataccgatgtgtctacataaatatgcaaagtctaaatattttttagagaatcttagttggtccaaattcttttccaagtacggtaatagatttttcatattgaacggtatcttcttaatctctggttctagttccgcattaaatgatgaaactaagtcactatttttataactaacgattacatcacctctaacatcatcatttaccagaatactgatcttcttttgtcgtaaatacatgtctaatgtgttaaaaaaaagatcatacaagttatacgtcatttcatctgtggtattcttgtcattgaaggataaactcgtactaatctcttctttaacagcctgttcaaatttatatcctatatacgaaaaaatagcaaccagtgtttgatcatccgcgtcaatattctgttctatcgtagtgtataacaatcgtatatcttcttctgtgatagtcgatacgttataaaggttgataacgaaaatatttttatttcgtgaaataaagtcatcgtaggattttggacttatattcgcgtctagtaaatatgcttttatttttggaatgatctcaattagaatagtctctttagagtccatttaaagttacaaacaactaggaaattggtttatgatgtataatttttttagtttttatagattctttattctatacttaaaaaatgaaaataaatacaaaggttcttgagggttgtgttaaattgaaagcgagaaataatcataaattatttcattatcgcgatatccgttaagtttgtatcgtaatggcgtggtcaattacaaataaagcggatactagtagcttcacaaagatggctgaaatcagagctcatctaaaaaatagcgctgaaaataaagataaaaacgaggatattttcccggaagatgtaataattccatctactaagcccaaaaccaaacgagccactactcctcgtaaaccagcggctactaaaagatcaaccaaaaaggaggaagtggaagaagaagtagttatagaggaatatcatcaaacaactgaaaaaaattctccatctcctggagtcagcgacattgtagaaagcgtggctgctgtagagctcgatgatagcgacggggatgatgaacctatggtacaagttgaagctggtaaagtaaatcatagtgctagaagcgatctttctgacctaaaggtggctaccgacaatatcgttaaagatcttaagaaaattattactagaatctctgcagtatcgactgttctagaggatgttcaagcagctggtatctctagacaatttacttctatgactaaagctattacaacactatctgatctagtcaccgagggaaaatctaaagttgttcgtaaaaaagttaaaacttgtaagaagtaaatgcgtgcacttttttataaagatggtaaactctttaccgataataattttttaaatcctgtatcagacgataatccagcgtatgaggttttgcaacatgttaaaattcctactcatttaacagatgtagtagtatatgaacaaacgtgggaggaggcgttaactagattaatttttgtgggaagcgattcaaaaggacgtagacaatacttttacggaaaaatgcatgtacagaatcgcaacgctaaaagagatcgtatttttgttagagtatataacgttatgaaacgaattaattgttttataaacaaaaatataaagaaatcgtccacagattccaattatcagttggcggtttttatgttaatggaaactatgttttttattagatttggtaaaatgaaatatcttaaggagaatgaaacagtagggttattaacactaaaaaataaacacatagaaataagtcccgatgaaatagttatcaagtttgtaggaaaggacaaagtttcacatgaatttgttgttcataagtctaatagactatataaaccgctattgaaactgacggatgattctagtcccgaagaatttctgttcaacaaactaagtgaacgaaaggtatacgaatgtatcaaacagtttggtattagaatcaaggatctccgaacgtatggagtcaattatacgtttttatataatttttggacaaatgtaaagtccatatctcctcttccatcaccaaaaaagttaatagcgttaactatcaaacaaactgctgaagtggtaggtcatactccatcaatttcaaaaagagcttacatggcaacgactattttagaaatggtaaaggataaaaattttttagatgtagtatctaaaactacgttcgatgaattcctatctatagtcgtagatcacgttaaatcatctacggatggatgatatagatctttacacaaataattacaagaccgataaatggaaatggataagcgtatgaaatctctcgcaatgacagctttcttcggagagctaaacacattagatattatggcattgataatgtctatatttaaacgccatccaaacaataccattttttcagtggataaggatggtcagtttatgattgatttcgaatacgataattataaggcttctcaatatttggatctgaccctcactccgatatttggagatgaatgcaagactcacgcatcgagtatagccgaacaattggcgtgtgcggatattattaaagaggatattagcgaatatatcaaaactactccccgtcttaaacgatttataaaaaaataccgcaatagatcagatactcgtatcagtcgagatacagaaaagcttaaaatagctctagctaaaggcatagattacgaatatataaaagacgcttgttaataagtaaatgaaaaaaaactagtcgtttataataaaacacgatatggatgccaacgtagtatcatcttctactattgcaacgtatatagacgctttagcgaagaatgcttcagaattagaacagaggtctaccgcatacgaaataaataatgaattggaactagtatttattaagccgccattgattactttgacaaatgtagtgaatatctctacgattcaggaatcgtttattcgatttaccgttactaataaggaaggtgttaaaattagaactaagattccattatctaaggtacatggtctagatgtaaaaaatgtacagttagtagatgctatagataacatagtttgggaaaagaaatcattagtgacggaaaatcgtcttcacaaagaatgcttgttgagactatcgacagaggaacgtcatatatttttggattacaagaaatatggatcctctatccgactagaattagtcaatcttattcaagcaaaaacaaaaaactttacgatagactttaagctaaaatattttctaggatccggtgcccaatctaaaagttctttgttgcacgctattaatcatccaaagtcaaggcctaatacatctctggaaatagaattcacacctagagacaatgaaacagttccatatgatgaactaataaaggaattgacgactctatcacgtcatatatttatggcttctccagagaatgtaattctttctccgcctattaacgcgcctataaaaacctttatgttgcctaaacaagatatagtaggtctggatctggaaaatctatatgccgtaactaagactgacggcattcctataactatcagagttacatcaaacgggttgtattgttattttacacatcttggttatattattagatatcctgttaagagaataatagattccgaagtagtagtctttggtgaggcagttaaggataagaactggaccgtatatctcattaagctaatagagcccgtgaatgcaatcaatgatagactagaagaaagtaagtatgttgaatctaaactagtggatatttgtgatcggatagtattcaagtcaaagaaatacgaaggtccgtttactacaactagtgaagtcgtcgatatgttatctacatatttaccaaagcaaccagaaggtgttattctgttctattcaaagggacctaaatctaacattgattttaaaattaaaaaggaaaatactatagaccaaactgcaaatgtagtatttaggtacatgtccagtgaaccaattatctttggagaatcgtctatctttgtagagtataagaaatttagcaacgataaaggctttcctaaagaatatggttctggtaagattgtgttatataacggcgttaattatctaaataatatctattgtttggaatatattaatacacataatgaagtgggtattaagtccgtggttgtacctattaagtttatagcagaattcttagttaatggagaaatacttaaacctagaattgataaaaccatgaaatatattaactcagaagattattatggaaatcaacataatatcatagtcgaacatttaagagatcaaagcatcaaaataggagatatctttaacgaggataaactatcggatgtgggacatcaatacgccaataatgataaatttagattaaatccagaagttagttattttacgaataaacgaactagaggaccgttgggaattttatcaaactacgtcaagactcttcttatttctatgtattgttccaaaacatttttagacgattccaacaaacgaaaggtattggcgattgattttggaaacggtgctgacctggaaaaatacttttatggagagattgcgttattggtagcgacggatccggatgctgatgctatagctagaggaaatgaaagatacaacaaattaaactctggaattaaaaccaagtactacaaatttgactacattcaggaaactattcgatccgatacatttgtctctagtgtcagagaagtattctattttggaaagtttaatatcatcgactggcagtttgctatccattattcttttcatccgagacattatgctaccgtcatgaataacttatccgaactaactgcttctggaggcaaggtattaatcactaccatggacggagacaaattatcaaaattaacagataaaaagacttttataattcataagaatttacctagtagcgaaaactatatgtctgtagaaaaaatagctgatgatagaatagtggtatataatccatcaacaatgtctactccaatgactgaatacattatcaaaaagaacgatatagtcagagtgtttaacgaatacggatttgttcttgtagataacgttgatttcgctacaattatagaacgaagtaaaaagtttattaatggcgcatctacaatggaagatagaccgtctacaaaaaactttttcgaactaaatagaggagccattaaatgtgaaggtttagatgtcgaagacttacttagttactatgttgtttatgtcttttctaagcggtaaataataatatggtatgggttctgatatccccgttctaaatgcattaaataattccaatagagcgatttttgttcctataggaccttccaactgtggatactctgtattgttaatagatatattaatacttttgtcgggtaacagaggttctacgtcttctaaaaataaaagttttataacatctggcctgttcataaataaaaacttggcgattctatatatactcttattatcaaatctagccattgtcttatagatgtgagctactgtaggtgtaccatttgattttctttctaatactatatatttctctcgaagaagttcttgcacatcatctgggaataaaatactactgttgagtaaatcagttattttttttatatcgatattgatggacatttttatagttaaggataataagtatcccaaagtcgataacgacgataacgaagtatttatacttttaggaaatcacaatgactttatcagattaaaattaacaaaattaaaggagcatgtatttttttctgaatatattgtgactccagatacatatggatctttatgcgtcgaattaaatgggtctagttttcagcacggtggtagatatatagaggtggaggaatttatagatgctggaagacaagttagatggtgttctacatccaatcatatatctaaagatatacccgaagatatgcacactgataaatttgtcatttatgatatatacacttttgacgctttcaagaataaacgattggtattcgtacaggtacctccgtcgttaggagatgatagtcatttgactaatccgttattgtctccgtattatcgtaattcagtagccagacaaatggtcaataatatgatttttaatcaagattcatttttaaaatatttattagaacatctgattagaagccactatagagtttctaaacatataacaatagttagatacaaggataccgaagaattaaatctaacgagaatatgttataatagagataagtttaaggcgtttgtattcgcttggtttaacggcgtttcggaaaatgaaaaggtactagatacgtataaaaaggtatctaatttgatataatgaattcagtgactgtatcacacgcgccatatactattacttatcacgatgattgggaaccagtaatgagtcaattggtagagttttataacgaagtagccagttggctgctacgagacgagacgtcgcctattcctgataagttctttatacagttgaaacaaccgcttagaaataaacgagtatgtgtgtgcggtatagatccgtatccgaaagatggaactggtgtaccgttcgaatcaccaaattttacaaaaaaatcaattaaggagatagcttcatctatatctagattaaccggagtaattgattataaaggttataaccttaatataatagacggggttataccctggaattattacttaagttgtaaattaggagaaacaaaaagtcacgcgatctactgggataagatttccaagttactgctgcagcatataactaaacacgttagtgttctttattgtttgggtaaaacagatttctcgaatatacgggcaaagttagaatccccggtaactaccatagtcggatatcatccagcggctagagaccgccaattcgagaaagatagatcatttgaaattatcaacgttttactggaattagacaacaaggcacctataaattgggctcaagggtttatttattaatgctttagtgaaattttaacttgtgttctaaatggatgcggctattagaggtaatgatgttatctttgttcttaagactataggtgtcccgtcagcgtgcagacaaaatgaagatccaagatttgtagaagcatttaaatgcgacgagttagaaagatatattgagaataatccagaatgtacactattcgaaagtcttagggatgaggaagcatactctatagtcagaattttcatggatgtagatttagacgcgtgtctagacgaaatagattatttaacggctattcaagattttattatcgaggtgtcaaactgtgtagctagattcgcgtttacagaatgcggtgccattcatgaaaatgtaataaaatccatgagatctaatttttcattgactaagtctacaaatagagataaaacaagttttcatattatctttttagacacgtataccactatggatacattgatagctatgaaacgaacactattagaattaagtagatcatctgaaaatccactaacaagatcgatagacactgccgtatataggagaaaaacaactcttcgggttgtaggtactaggaaaaatccaaattgcgacactattcatgtaatgcaaccaccgcatgataatatagaagattacctattcacttacgtggatatgaacaacaatagttattacttttctctacaacaacgattggaggatttagttcctgataagttatgggaaccagggtttatttcattcgaagacgctataaaaagagtttcaaaaatattcattaattctataataaactttaatgatctcgatgaaaataattttacaacggtaccactggtcatagattacgtaacaccttgtgcattatgtaaaaaacgatcgcataaacatccgcatcaactatcgttggaaaatggtgctattagaatttacaaaactggtaatccacatagttgtaaagttaaaattgttccgttggatggtaataaactgtttaatattgcacaaagaattttagacactaactctgttttattaaccgaacgaggagaccatatagtttggattaataattcatggaaatttaacagcgaagaacccttgataacaaaactaattttgtcaataagacatcaactacctaaggaatattcaagcgaattactctgtccgaggaaacgaaagactgtagaagctaacatacgagacatgttagtagattcagtggagaccgatacctatccggataaacttccgtttaaaaatggtgtattggacctggtagacggaatgttttactctggagatgatgctaaaaaatatacgtgtactgtatcaaccggatttaaatttgacgatacaaagttcgtcgaagacagtccagaaatggaagagttaatgaatatcattaacgatatccaaccattaacggatgaaaataagaaaaatagagagctatatgaaaaaacattatctagttgtttatgcggtgctaccaaaggatgtttaacattcttttttggagaaactgcaactggaaagtcgacaaccaaacgtttgttaaagtctgctatcggtgacctgtttgttgagacgggtcaaacaattttaacagatgtattggataaaggacctaatccatttatcgctaacatgcatttgaaaagatctgtattctgtagcgaactacctgattttgcatgtagtgggtcaaagaaaatcagatctgataatattaaaaagttgacagaaccttgtgtcattggaagaccgtgtttctccaataaaattaataatagaaaccatgcgacaatcattatcgatactaattacaaacctgtttttgataggatagataacgcattaatgagaagaattgccgtcgtgcgattcagaacacacttttctcaaccttctggtagagaggctgctgaaaataatgacgcgtacgataaagtcaaactattagacgaggggttagatggtaaaatacaaaataatagatatagattcgcatttctatacttgttggtgaaatggtacaaaaaatatcatgttcctattatgaaactatatcctacaccggaagagattcctgactttgcattctatctcaaaataggtactctgttagtatctagctctgtaaagcatattccattaatgacggacctctccaaaaagggatatatattgtacgataatgtggttactcttccgttgactactttccaacagaaaatatccaagtattttaattctagactatttggacacgatatagagagcttcatcaatagacataagaaatttgccaatgttagtgatgaatatctgcaatatatattcatagaggatatttcatctccgtaaatatatgctcatatatttatagaagatatcacatatctaaatgaataccggaatcatagatttatttgataatcatgttgatagtataccaactatattacctcatcagttagctactctagattatctagttagaactatcatagatgagaacagaagcgtgttattgttccatattatgggatcaggtaaaacaataatcgctttgttgttcgccttggtagcttccagatttaaaaaggtttacattctagtgccgaacatcaacatcttaaaaattttcaattataatatgggtgtagctatgaacttgtttaatgacgaattcatagctgagaatatctttattcattccacaacaagtttttattctcttaattataacgataacgtcattaattataacggattatctcgctacaataactctatttttatcgttgatgaggcacataatatctttgggaataatactggagaacttatgaccgtgataaaaaataaaaacaagattccttttctactattgtctggatctcccattactaacacacctaatactctgggtcatattatagatttaatgtccgaagagacgatagattttggtgaaattattagtcgtggtaagaaagtaattcagacacttcttaacgaacgaggtgtgaatgtacttaaggatttgcttaaaggaagaatatcatattacgaaatgcctgataaagatctaccaacgataagatatcacggacgtaagtttctagatactagagtagtatattgtcacatgtctaaacttcaagagagagattatatgattactagacgacagctatgttatcatgaaatgtttgataaaaatatgtataacgtgtcaatggcagtattgggacaacttaatctgatgaataatttagatactttatttcaggaacaggataaggaattgtacccaaatctgaaaataaataatggcgtgttatacggagaagaattggtaacgttaaacattagttccaaatttaaatactttattaatcggatacagacactcaacggaaaacattttatatacttttctaattctacatatggcggattggtaattaaatatatcatgctcagtaatggatattctgaatataatggttctcagggaactaatccacatatgataaacggcaaaccaaaaacatttgctatcgttactagtaaaatgaaatcgtctttagaggatctattagatgtgtataattctcctgaaaacgatgatggtagtcaattgatgtttttgttttcatcaaacattatgtccgaatcctatactctaaaagaggtaaggcatatttggtttatgactatcccagatactttttctcaatacaaccaaattcttggacgatctattagaaaattctcttacgccgatatttctgaaccagttaatgtatatcttttagccgccgtatattccgatttcaatgacgaagtgacgtcattaaacgattacacacaggatgaattaattaatgttttaccatttgacatcaaaaagctgttgtatctaaaatttaagacgaaagaaacgaatagaatatactctattcttcaagagatgtctgaaacgtattctcttccaccacatccatcaattgtaaaagttttattgggagaattggtcagacaatttttttataataattctcgtattaagtataacgataccaagttacttaaaatggttacatcagttataaaaaataaagaagacgctaggaattacatagatgatattgtaaacggtcacttctttgtatcgaataaagtatttgataaatctcttttatacaaatacgaaaacgatattattacagtaccgtttagactttcctacgaaccatttgtttggggagttaactttcgtaaagaatataacgtggtatcttctccataaaactgatgagatatataaagaaataaatgtcgagctttgttaccaatggatacctttccgttacattggaaccacacgagctgacgttagacataaaaactaatattaggaatgccgtatataagacgtatctccatagagaaattagtggtaaaatggccaagaaaatagaaattcgtgaagacgtggaattacctctcggcgaaatagttaataattctgtagttataaacgttccgtgtgtaataacctacgcgtattatcacgttggggatatagtcagaggaacattaaacatcgaagatgaatcaaatgtaactattcaatgtggagatttaatctgtaaactaagtagagattcgggtactgtatcatttagcgattcaaagtactgcttttttcgaaatggtaatgcgtatgacaatggcagcgaagtcactgccgttctaatggaggctcaacaaggtatcgaatctagttttgtttttctcgcgaatatcgtcgactcataaaaaagagaatagcggtaagtataaacacgaatactatggcaataattgcgaatgttttattctcttcgatatatttttgataatatgaaaaacatgtctctctcaaatcggacaaccatctcataaaatagttctcgcgcgctggagaggtagttgccgctcgtataatctctccagaataatatacttgcgtgtcgtcgttcaatttatacggatttctatagttctctgttatataatgcggtttgccctcatgattagacgacgacaatagtgttctaaatttagatagttgatcagaatgaatgtttattggcgttggaaaaattatccatgcagcgtctgcagagtggttgatagttgttcctagatatgtaaaataatccaacttactaggcagcaaattgtctagataaaatactgaatcaaacggtgcagacgtattggcggatctaatggaatccaattgattaactatcttttgaaaatatacatttttatgatccaatacttgtaagaatatagaaataatgataagtccatcatcgtgtttttttgcctcttcataagaactatattttttcttattccaatgaacaagattaatctctccagagtatttgtacacatctatcaagtgattggatccataatcgtcttcctttccccaatatatatgtagtgatgataacacatattcattggggagaaaccctccacttatatatcctcctttaaaattaatccttactagttttccagtgttctggatagtggttggtttcgactcattataatgtatgtctaacggcttcaatcgcgcgttagaaattgcttttttagtttctatattaataggagatagttgttgcggcatagtaaaaatgaaatgataactgtttaaaaatagctcttagtatgggaattacaatggatgaggaagtgatatttgaaactcctagagaattaatatctattaaacgaataaaagatattccaagatcaaaagacacgcatgtgtttgctgcgtgtataacaagtgacggatatccgttaataggagctagaagaacttcattcgcgttccaggcgatattatctcaacaaaattcagattctatctttagagtatccactaaactattacggtttatgtactacaatgaactaagagaaatctttagacggttgagaaaaggttctatcaacaatatcgatcctcactttgaagagttaatattattgggtggtaaactagataaaaaggaatctattaaagattgtttaagaagagaattaaaagaggaaagtgatgaacgtataacagtaaaagaatttggaaatgtaattctaaaacttacaacacgggataaattatttaataaagtatatataagttattgcatggcgtgttttattaatcaatcgttggaggatttatcgcatactagtatttacaatgtagaaattagaaagattaaatcattaaatgattgtattaacgacgataaatacgaatatctgtcttatatttataatatgctagttaatagtaaatgaacttttacagatctagtataattagtcagattattaagtataatagacgactagctaagtctattatttgcgaggatgactctcaaattattacactcacggcattcgttaaccaatgcctatggtgtcataaacgagtatccgtgtccgctattttattaactactgataacaaaatattagtatgtaacagacgagatagttttctctattctgaaataattagaactagaaacatgtttagaaaaaaacgattatttctgaattattccaattatttgaacaaacaggaaagaagtatactatcgtcatttttttctctagatccagctactactgataatgatagaatagacgctatttatccgggtggcatacccaaaaggggtgagaatgttccagagtgtttatccagggaaattaaagaagaagttaatatagacaattcttttgtattcatagacactcggttttttattcatggcatcatagaagataccattattaataaattttttgaggtaatcttctttgtcggaagaatatctctaacgagtgatcaaatcattgatacatttaaaagtaatcatgaaatcaaggatctaatatttttagatccgaattcaggtaatggactccaatacgaaattgcaaaatatgctctagatactgcaaaacttaaatgttacggccatagaggatgttattatgaatcattaaaaaaattaactgaggatgattgattagaaaatataaattaatttaccatcgtgtatttttataacgggattgtccggcatatcatgtagatagttaccgtctacatcgtatactcgaccatctacgcctttaaatcctctatttattgacattaatctattagaattggaataccaaatattagtaccctcaattagtttattggtaatattttttttagacgatagatcgatggctcttgaaaccaaggttttccaaccggactcattgtcgatcggtgaaaagtctttttcattagcatgaatccattctaatgatgtatgtttaaacactctaaacaattggacaaattcttttgatttgctttgaatgatttcaaataggtcttcgtctacagtaggcataccattagataatctagccattataaagtgcacgtttacatatctacgttctggaggagtaagaacgtgactattgagacgaatggctcttcctactatctgacgaagagacgcctcgttccatgtcatatctaaaatgaagatatcattaattgagaaaaaactaataccctcgcctccactagaagagaatacgcatgttttaatgcattctccgttagtgtttgattcttggttaaactcagccaccgccttgattctagtatcttttgttctagatgagaactctatattagagataccaaagactttgaaatatagtaataagatttctattcctgactgattaacaaatggttcaaagactagacatttaccatgggatgctaatattcccaaacatacatctataaatttgacgcttttctcttttaattcagtaaatagagagatatcagccgcactagcatcccctttcaatagttctccctttttaaaggtatctaatgcggatttagaaaactctctatctcttaatgaatttttaaaatcattatatagtgttgctatctcttgcgcgtattcgcccggatcacgattttgtctttcaggaaagctatcgaacgtaaacgtagtagccatacgtctcagaattctaaatgatgatatacctgtttttatttcagcgagtttagccttttgataaatttcttcttgctttttcgacatattaacgtatcgcattaatactgttttcttagcgaatgatgcagacccttctacgtcatcaaaaatagaaaactcgttattaactatatacgaacatagtcctcctagtttggagactaattctttttcatcgactagacgtttattctcaaatagtgattggtgttgtaaggatcctggtcgtagtaagttaaccaacatggtgaattcttgcacactattgacgataggtgtagccgataaacaaatcatcttatggttttttaacgcaatggtcttagataaaaaattatatactgaacgagtaggacggatcttaccatcttctttgattaatgatttagaaatgaagttatgacattcatcaatgatgacgcatattctactcttggaattaatagttttgatattagtaaaaaatttatttctaaaattttgatcatcgtaattaataaaaatacaatccttcgttatctctggagcgtatctgagtatagtgttcatccaaggatcttctatcaaagcctttttcaccaataagataatagcccaattcgtataaatatccttaagatgtttgagaatatatacagtagtcattgttttaccgacacccgtttcatggaacaataaaagagaatgcatactgtctaatcctaagaaaactcttgctacaaaatgttgataatccttgaggcgtactacgtccgaccccatcatttcaacgggcatattagtagttctgcgtaaggcataatcgatataggccgcgtgtgatttactcatttatgagtgataagtaataactatgttttaaaaatcacagcagtagtttaactagtcttctctgatgtttgttttcgatactttttgaatcagaagtcatactagaataaagcaacgagtgaacgtaatagagagcttcgtatactctattcgaaaactctaagaacttattaatgaattccgtatccactggattgtttaaaatactaaattgaacactgttcacatccttccaagaagaagacttagtgacggacttaacatgagacataaataaatccaaattttttttacaaacatcactagccaccataatggcgctatctttcaaccagctatcgcttacgcattttagcagtctaacatttttaaagagactacaatatattctcatagtatcgattacacctctaccgaataaagttggaagtttaataatacaatatttttcgtttacaaaatcaaataatggtcgaaacacgtcgaaggttaacatcttataatcgctaatgtatagattgttttcagtgagatgattattagatttaatagcatctcgttcacgtttgaacagtttattgcgtgcgctgaggtcggcaactacggcgtccgctttagtactcctcccataatactttacgctattaatctttaaaatttcatagactttatctagatcgctttctggtaacatgatatcatgtgtaaaaagttttaacatgtcggtcggcattctatttagatcattaactctagaaatctgaagaaagtaattagctccgtattccagactaggtaatgggcttttacctagagacagattaagttctggcaatgtttcataaaatggaagaaggacatgcgttccctcccggatattttttacaatttcatccatttacaactctatagtttgttttcattattattagttattatctcccataatcttggtaatacttaccccttgatcgtaagataccttatacaggtcattacatacaactaccaattgtttttgtacataatagattggatggttgacatccatggtggaataaactactcgaacagatagtttatctttccccctagatacattagccgtaatagttgtcggcctaaagaatatctttggtgtaaagttaaaagttagggttcttgttccattattgctttttgtcagtagttcattataaattctcgagatgggtccgttctctgaatatagaacatcatttccaaatctaacttctagtctagaaataatatcggtcttattcttaaaatctattcccttgatgaagggatcgttaatgaacaaatccttggcctttgattcggctgatctattatctccgttatagacgttacgttgactagtccaaagacttacaggaatagatgtatcgatgatgttgatactatgtgatatgtgagcaaaaattgttctcttagtggcatcgctatatgttccagtaatggcggaaaactttttagaaatgttatatataaaagaattttttcgtgttccaaacattagcagattagtatgaagataaacactcatattatcaggaacattatcaatttttacatacacatcagcatcttgaatagaaacgataccatcttctggaacctctacgatctcggcagactccggataaccagtcggtgggccatcactaacaataactagatcatccaacaatctactcacatatgcatctatataatctttttcatcttgtgagtaccctggatacgaaataaatttattatccgtatttccataataaggtttagtataaacagagagcgatgttgccgcatgaacttcagttacagtcgccgttggttggtttatttgacctattactctcctaggtttctctataaatgatggtttaatttgtacattcttaaccatatatccaataaagctcaattcaggaacataaacaaattctttgttgaacgtttcaaagtcgaacgaagagtcacgaataacgatatcggatactggattgaaggttaccgttacggtaatttttgaatcggatagtttaagactgctgaatgtatcttccacatcaaacggagttttaatataaacgtatactgtagatggttctttaatagtgtcattaggagttaggccaatagaaatatcattaagttcactagaatatccagaatgtttcaaagcaattgtattattgatacaattattatataattcttcgccctcaatttcccaaataacaccgttacacgaagagatagatacgtgattaatacatttatatccaacatatggtacgtaactgaatcttcccatacctttaacttctggaagttccaaactcagaaccaaatgattaagcgcagtaatatactgatccctaatttcgaagctagcgatagcctgattgtctggaccatcgtttgtcataactccggatagagaaatatattgcggcatatataaagttggaatttgactatcgactgcgaagacattagaccgtttaatagagtcatccccaccgatcaaagaattaatgatagtattattcattttctatttaaaatggaaaaagcttacaataaactccgtagagaaatatctataatttgtgagttttccttaaagtaacagcttccgtaaacgccgtctttatctcttagtaggtttattgtatttatgaccttttccttatcttcatagaatactaaaggcaacaaagaaatttttggttcttctctaagagctacgtgagacttaaccatagacgccaacgaatccctacatattttagaacagaaataccctacttcaccacccttgtatgtctcaatactaataggtctaaaaaccaaatcttgattacaaaaccaacacttatcaattacactatttgtcttaatagacacatctgccatagatttataatactttggtagtatacaagcgagtgcttcttctttagcgggcttaaagactgctttaggtgctgaaataaccacatctggaaggcttactcgcttagccatttaattacggaactatttttttatacttctaatgagcaagtagaaaacctctcatctacaaaaacgtactcgtgtccataatcctctaccatagttacacgttttttagatctcatatgtgctaaaaagttttcccatactaattggttactattatttttcgtataatttttaacagtttgaggttttagatttttagttacagaagtgatatcgaatattttatccaaaaagaatgaataattaattgtcttagaaggagtgttttcttggcaaaagaataccaagtgcttaaatatttctactacttcattaatcttttctgtactcagattcagtttctcatcttttacttgattgattatttcaaagactaacttataatcctttttatttattctctcgttagccttaagaaaactagatacaaaatttgcatctacatcatccgtggatatttgatttttttccatgatatccaagagttccgagataatttctccagaacattgatgagacaataatctccgcaatacatttctcaaatgaataagtttattagacacatggaagtttgactttttttgtacctttgtacatttttgaaatacagactcgcaaaaaatacaatattcatatccttgttcagatactataccgttgtgtctacaaccgctacataatcgtagattcatgttaacactctacgtatctcgtcgtccaatattttatataaaaacattttatttctagacgttgccagaaaatcctgtaatatttttagttttttgggctgtgaataaagtatcgccctaatatggttaccgtcttccgccaatatagtagttaaattatccgcacatgcagaagaacaccgcttaggcggattcagtacaatgttatatttttcgtaccaactcatttaaatatcataatctaaaatagttctgtaatatgtctagcgctaatatattgatcataatcctgtgcataaattaagatacaacaatgtctcgaaatcatcgacatggcttcttccatagttagaagatcgtcgtcaaagttagcaacgtgattcatcaacatttgctgttttgaggcagcaaatactgaaccgtcgccattcaaccattcataaaaaccatcgtctgaatccattgataatttcttgtactggtttttgagagctcgcatcaatctagcatttctagctcccggattgaaaacagaaagaggatcgtacatccagggtccattttctgtaaatagaatcgtataatgtcccttcaagaagatatcagacgatccacaatcaaagaattggtctccgagtttgtaacaaacagcggactttaacctatacatgataccgtttagcataatttctggtgatacgtcaatcggagtatcatctattagagatctaaagccggtgtaacattctccaccaaacatattcttattctgacgtcgttctacataaaacatcattgctccattaacgataacaggggaatgaacagcactacccatcacattagttcccaatggatcaatgtgtgtaactccagaacatcttccatatcctatgttaggaggagcgaacaccactcttccactattgccatcgaatgccatagaataaatatccttggaattgatagaaatcggactgtcggatgttgtgatcatcttcataggattaacaactatgtatggtgccgcctgaagtttcatatcgtaactgatgccgtttataggtctagccacagaaaccaacgtaggtctaaatccaactatagacaaaatagaagccaatatctgttcctcatctgtcataacttgagagcatccagtatgaataatcttcattagatggggatctaccgcatcatcatcgttacaataaaaaattcccattctaatgttcataattgcttttctaatcatggtatgcatgtttgctctctgaatctctgtggaaattagatctgatacacctgtaatcactatcggattatcctccgtaagacgattaaccaacaacatataattataagactttacttttctaaattcataaagttgctggattaggctataggtgtctccatgtacatacgcgttctcgagcgcaggaagtttaataccgaatagtgccatcagaataggatgaatatagtaattagtttctggttttctataaataaaagacaaatcttgtgaactagacatatcggtaaaatgcatggattggaatcgtgtagtcgacagaagaatatgatgattagatggagagtatattttatctaactctttgagttggtcaccgattctaggactagctcgagaatgaataagtactaaaggatgagtacatttcacagaaacactagcattgttcaatgtgctctttacatgggtaaggagttgaaatagctcgtttctatttgttctgacaatatttagtttattcataatgttaagcatatcctgaatagtaaagttagatgtgtcatacttgttagtagttagatatttagcaattgcattcccatcatttctcaatctcgtactccaatcatgtgtagatgctacttcgtcgatggaaaccatacaatcctttttgataggctgttgagattgatcatttcctgcacgtttaggtttggtacgttgatttctagcccctgcggatataaagtcatcgtctacaatttgggacaatgaattgcatacactacaagacaaagatttatcagaagtgtgaatatgatcttcatctaccaaagaaagagtttgattagtataactagattttagtcctgcgttagatgttaaaaaaacatcgctattgaccacggcttccattatttatattcgtagtttttactcgaaagcgtgattttaatatccaatcttattacttttggaatcgttcaaaacctttgactagttgtagaatttgatctattgccctacgcgtatactcccttgcatcatatacgttcgtcaccagatcgtttgtttcggcctgaagttggtgcatatctctttcaacattcgacatgagatccttaagggccatatcgtctagattttgttgagatgctgctcctggatttggattttgttgtgctgttgtacatactgtaccaccagtaggtgtaggagtacatacagtggccacaataggaggttgagaaagtgtaaccgttggagtagtacaagaaatacttccatccgattgttgtgtacatgtagttgttggtaacgtctgagaaggttgggtagatggcggcgtcgtcgttttttgatctttattaaatttagagataatatcctgaacagcattgctcggcgtcaacgctggaaggagtgaactcgccggcgcatcagtatcttcagacagccaatcaaaaagattagacatatcagatgatgtattagtttgttgtcgtggttttggtgtaggagcagtactactaggtagaagaataggagccgatgtagctgttggaaccggctgtggagttatatgaatagttggttgtagcggttggataggctgtctgctggcggccatcatattatctctagctagttgttctcgcaactgtctttgataatacgactcttgagactttagtcctatttcaatcgcttcatcctttttcgtatccggatccttttcttcagaataatagattgacgactttggtgtagaggattctgccagcctctgtgagaacttgttaaagaagtccatttaaggctttaaaattgaattgcgattataagattaaatggcagacacagacgatattatcgactatgaatccgatgatctcaccgaatacgaggatgatgaagaagaggaagaagatggagagtcactagaaactagtgatatagatcccaaatcttcttataagattgtagaatcagcatccactcatatagaagatgcgcattccaatcttaaacatatagggaatcatatatctgctcttaaacgacgctatactagacgtataagtctatttgaaatagcgggtataatagcagaaagctataacttgcttcaacgaggaagattacctctagtttcagaattttctgacgaaacgatgaagcaaaatatgctacatgtaattatacaagagatagaggagggttcttgtcctatagtcatcgaaaagaacggagaattgttgtcggtaaacgattttgacaaagatggtctaaaattccatctagactatattatcaaaatttggaaacttcaaaaacgatattagaatttatacgaatatcgttctctaaatgtcacaatcaagtctcgcatgttcagcaatttattgtcgtactttatatcgtgttcattaacgatatcttgcaaaatagtaatgattctatcttccttcgatagatattcttcagagattattgtcttatattctttcttgttatcagatatgaatttgataagactttgaacattattgatacccgtctgtttaattttttctacagatattttagttttggcagattctatcgtatctgtcaatagacatccaacatcgacattcgacgtcaattgtctataaatcaacgtataaattttagaaataacattagcgaattgttgtgcgttgatgtcgttattctgaaacagtatgattttaggtagcattttcttaacaaagagaacgtatttattgttactcagttgaacagatgatatatccagattactaacgcatctgattccgtataccaaactttcagaagaaatggtatacaattgtttgtattcattcaatgtctctttttcagaaattagtttagagtcgaatactgcaataattttcaagagatagttttcatcagataagattttatttagtgtagatatgataaaactattgttttgttggagaacttgatacgccgcgttctctgtagtcgacgctctcaaatgggaaacaatctccattatttttttggaatcggatactatatcttcggtatcttgacgcagtctagtatacatagagttaagagagattagagtttgtacattaagcaacatgtctctaaatgtggctacaaacttttcctttttcacatcatctagtttattatataccgatttcacaacggcaccagatttaaggaaccagaatgaaaaactctgataactacaatatttcatcatagttacgattttatcatcttctatagttggtgtaatagcgcatacctttttctccaagactggaaccaacgtcataaaaatgtttaaatcaaaatccatatcaacatctgatgcgctaagaccagtctcgcgttcaagattatctttactaatggtgacgaactcatcgtataaaactctaagtttgtccattatttatttacagatttagttgtttaatttatttgtgctcttccagagttgggatagtatttttctaacgtcggtattatattattaggatctacgttcatatgtatcataatattaatcatccacgttttgataaatctatctttagcttctgaaataacgtatttaaacaaaggagaaaaatatttagctacggcatcagacgcaataacattttttgtaaatgtaacgtatttagacgacagatcttcgttaaaaagttttccatctatgtagaatccatcggttgttaacaccattcccgcgtcagattgaataggagtttgaatagtttgttttggaaatagatccttcaataacttatagttgggtgggaaaaaatcgattttatcactagactctttcttttttactatcattacctcatgaactatttcttgaatgagtatatgtattttctttcctatatcggacgcgttcattggaaaatataccatgtcgttaactataagaatatttttatcctcgtttacaaactgaataatatcagatgtagttcgtaaacgaactatatcatcaccagcacaacatctaactatatgatatccactagtttcctttagccgtttattatcttgttccatattagcagtcattccatcatttaagaaggcgtcaaagataatagggagaaatgacattttggattctgttacgactttaccaaaattaaggatatacggacttactatctttttctcaacgtcaatttgatgaacacacgatgaaaatgtgcttctatgagattgatcatgtagaaaacaacaagggatacaatatttccgcatatcatgaaatatattaagaaatcccaccttattatatttccccaaaggatccatgcacgtaaacattatgccgttatcattaataaagacttctttctcatcggatctgtaaaagttgttactgatttttttcattccaggatctagataattaataatgatgggttttctattcttattctttgtattttggcatatcctagaccagtaaacagtttccactttggtaaaatcagcagacttttgaacgctattaaacatggcattaatggcaataactaaaaatgtaaaatatttttctatgttaggaatatggtttttcactttaatagatatatggtttttggccaaaatgatagatatttttttatccgaggatagtaaaatattattagtcgccgtctctataaaaatgaagctagtctcgatatccaattttattctagaattgataggagtcgccaaatgtaccttatacgttatatctcccttgatgcgttccatttgtgtatctatatcggacacaagatctgtaaatagttttacgttattaatcatcacggtatcgccgtcgctagataacgctaatgtaccatccaagtcccaaatggagagatttaactgttcatcgtttagaataaaatgattaccggtcatattaataaagtgttcatcgtatctagataacaacgacttataattaatgtccaagtcttgaactcgctgaatgatcttttttaacccagttagttttagattggtacgaaatatattgttaaactttgattctacagtaatgtccaaatctagttgtggaaatacttccatcaacattgtttcaaacttgataatattattatctacatcttcgtacgatccaaattccggaatagatgtatcgcacgctctggccacccagataaccaaaaagtcacacgctccaggatatacattgtataaaaagctatcgttttttagtagggtttttttctgcgtgtatacgaagggattaaaaatagtattatcaacgtaactatattccaaattattcttatgagaatagataataatatcgtccttaatatctaacaaatttcctaaatatccctttaattgagtcattcgaagcgtcaatagaatatgtctcttaactatttccggctgttgtatatttaaatgacttcgtaaaaaataatatatgggcgacttctcatctatgtaatcatatggagtgagatatagggctcgttctacctcctgccccttacccacctgtaataccaattgcggacttactatatatcgcatatttatatcgtggggtaaagtgaaaatctactaccgatgatgtaagtcttacaatgttcgaaccagtaccagatcttaatttggaggcctccgtagaactaggggaggtaaatatagatcaaacaacacctatgataaaggagaatagcggttttatatcccgcagtagacgtctattcgcccatagatctaaggatgatgagagaaaactagcactacgattctttttacaaagactttattttttagatcatagagagattcattatttgttcagatgcgttgacgctgtaaaagacgtcactattaccaaaaaaaataacattatcgtggcgccttatatagcacttttaactatcgcatcaaaaggatgcaaacttacagaaacaatgattgaagcattctttccagaactatataatgaacatagtaagaaatttaaattcaactctcaagtatccatcatccaagaaaaactcggataccagtttggaaactatcacgtttatgattttgaaccgtattactctacagtagctctggctattcgagatgaacattcatctggcatttttaatatccgtcaagagagttatctggtaagttcattatctgaaataacatatagattttatctaattaatctaaaatctgatcttgttcaatggagtgctagtacgggcgctgtaattaatcaaatggtaaatactgtattgattacagtgtatgaaaagttacaactggtcatagaaaatgattcacaatttacatgttcattggctgtggaatcaaaacttccaataaaattacttaaagatagaaatgaattatttacaaaattcattaacgagttaaaaaagaccagttcattcaagataagcaaacgcgataaggatacgctactaaaatattttacttaggactggagttagaatttatagacgactcatttcgtttatcattgttactattattactattactatcattattagtgttggcattattagtattcttcttgtcatcttgttcagaaatatacagcaatgctatacctaatactaaatacattatcatgctcgcaatggctctaacaacaacgaaccaaaatgaatttggtcgtagcttttgttcacaaaaatacataaagaaatgtctacataaatctatggcgccattggctacttgaaatagcgccagtcctcctacagattttaatatagctgtataacatgacatttattcatcatcaaaagagacagagtcaccatctgtcatatttagattttttttcatgtgttcaaagtatcctctactcatttcattataatagtttatcatacttagaattttaggacggatcaatgagtaagacttgactagatcgtcagtagtaatttgtgcatcgtctattctgcatccgcttcgtcgaataatgtatagcatcgctttgagattctccatagctatcaagtctttatacaatgacatggaaatatctgtgaatactttatacttctccaacatcgatgccttaacatcatcgcctactttagcattgaaaatacgttctattgtgtagatggatgtagcaagatttttaaacaacaatgccatcttacacgatgattgcctcaagtctccaatcgtttgtttagaacgattagctacagagtccaatgcttggctgactagcatattattatctttagaaattgtattcttcaatgaggcgtttatcatatctgtgatttcgttagtcatattacagtctgactgggttgtaatgttatccaacatatcacctatggatacggtacacgtaccagcatttgtaataatcctatctaagatgttgtatggcattgcgcagaaaatatcttctcctgtaatatctccactctcgataaatctactcagattattcttaaatgccttattctctggagaaaagatatcagtgtccatcatttcattaatagtatacgcagaaaagataccacgagtatcaattctatccaagatacttatcggttccgagtcacagataatggtttcctctccttcgggagatcctgcatagaaatatctaggacaatagtttctatactgtctgtaactctgataatctctaaagtcactaactgataccatgaaattgagaagatcaaacgctgaagtaattaatttttctgcctcgtttttactacaactagttttcatcaatgtagtgacgatgtattgtttagttacttttggtctaatactgatgatagagatattattgcttcccataatggatcttctagtagtcaccttaaagcccattgatgcgaatagcagatagataaagtcttggtatgactcctttctaatatagtacggactacctttgtcacccaactttatacccacataagccataacaacctctttaatagccgtttcatgaggtttatcagccatgagcctgagtagttggaagaatctcatgaatcccgtctcagaaagtcctatatgcatgatagatttatctttcctgggaaactctcgtatagtcatagatgaaatactctttaaagtttctgaaataagattagtaacagtcttacctccgactactctaggtaacaaacaaactctaataggtgttttctctgcggagataatatcagaaaggatagagcaataagtagtattattgtgattataaagaccgaatacataacaggtagaatttataaacatcatgtcctgaaggtttttagacttgtattcctcgtaatccataccgtcccaaaacatggatttggtaactttgatagccgtagatctttgttccttcgccaacaggttaaagaaattaataaagaatttgtggtttctacctatgtctacaaattgcacgtttggaagcgccacggttacattcactgcagcattttgaggatcgcgagtatgaagtacgatgttattgtttactggtatatctggaaagaaatctaccagtctaggaataagagattgatatcgcatagaaatagtaaagtttataatctcatcatcgaagagcattttgttaccattgtaataaatatccactctgtcatatgtataaatgaagtactgttcaaacatgatgagatgtttatatgttggcatagtagtgagatcgacgtttggtaatggcaatgtattaagattaactccataatgtctagcagcatctgcgatgttataagcgtcgtcaaagcggggtcgatcttgtattgttatatattgtctaacacctataagattatcaaaatcttgtctgcttaatacaccgttaacaatttttgccttgaattcttttattggtgcattaataacatccttatagaggatgttaaacaaataagtgttatcaaagttaagatctggatatttcttttctgctagaacatccattgagtcggagccatctggtttaatataaccaccgataaatctagctctgtattctgtatccgtcaatctaatattaagaaggtgttgagtgaaaggtggaagatcgtaaaagctgtgagtattaatgataggattagtttccgaactaatgttaattggggtattaataatatctatatttccagcgttaagtgtaacattaaacagttttaattcacgtgacgtggtatcaattaaataattaatgcccaatttggatatagcagcctgaagctcatcttgtttagttacggatcctaatgagttattaagcaatatatcgaacggatgaacgaaggttgttttaagttggtcacatactttgtaatctagacatagatgcggaagaacggtagaaactatacgaaataaatattcagagtcctctaattgatcaagagtaactattgacttaataggcatcatttatttagtattaaatgacgaccgtaccagtgacggatatacaaaacgatttaattacagagttttcagaagataattatccatctaacaaaaattatgaaataactcttcgtcaaatgtctattctaactcacgttaacaacgtggtagatagagaacataatgccgccgtagtgtcatctccagaggaaatatcctcacaacttaatgaagatctatttccagatgatgattcaccggccactattatcgaacgagtacaacctcatactactattattgacgatactccacctcctacgtttcgtagagagttattaatatcggaacaacgtcaacaacgagaaaaaagatttaatattacagtatcgaaaaatgctgaagcaataatggaatctagatctatgataacttctatgccaacacaaacaccatccttgggagtagtttatgataaagataaaagaattcagatgttagaggatgaagtggttaatcttagaaatcaacgatctaatacaaaatcatctgataatttagataattttaccaaaatactatttggtaagactccgtacaaatcaacagaagttaataagcgtatagccatcgttaattatgcaaatttgaacgggtcccccttatcagtcgaggacttggatgtttgttcggaggatgaaatagatagaatctataaaacgattaaacaatatcacgaaagtagaaaacgaaaaattatcgtcactaacgtgattattattgtcataaacattatcgagcaggcattgctaaaactcggatttgaagaaatcaaaggactgagtaccgatatcacttcagaaattatcgatgtggagatcggagatgactgcgatgctgtagcatcaaaactaggaatcggtaacagtccggttcttaatattgtattgtttatactcaagatattcgttaaacgaattaaaattatttaatttaatacattcccatatccagacaacaatcgtctggattaatctgttcctgtcgtctcataccggacgacatattaatctttttattagtgggcatctttttagatggtttctttttcccagcattaactgagtcgatacctagaagatcgtgattgatctctccgaccattccacgaacttctaattggccgtctctgacggtaccataaactattttaccagcattagtaacagcttggacaatctgaccatccatcgcattgtacgatgtagtagtaactgttgttctacgtctaggagcaccagaagtatttttggagcccttggatgttgatgtagaagaagacgaggattttgattttggtttacatgtaatacattttgaactctttgattttgtatcacatgcgccggcagtcacatctgtttgagaattaagattattgttgcctcctttgacggctgcatctccaccgatttgcgctagtagatttttaagctgtggtgtaatcttattaactgtttcgatataatcatcgtaactgcttctaacggctaaattttttttatccgccatttagaagctaaaaatatttttatttatgcagaagatttaactagattatacaatgaactaatatgatccttttccagattatttacaaacttggtattttttggttctggaggaggcgaatttaaattcggacttggattcggattttgtaagttcttgatcttattatacatcgagtataggatggcgacagtaactgctacacaaataccgatcaaaagaagaataccaatcatttattgacaataacttcactattgatcaagtatgcaatatatcatcttttcactaaataagtagtaataatgattcaacaatgtcgagatatatggacgataataatttagttcatggaaatatcgctatgattggtgtgaatgactccgctaactctgtggggtgcgcagtgctttccccacatagaataaattagcattccgactgtgataataataccaagtataaacgccataatactcaatactttccatgtacgagtgggactggtagacttactaaagtcaataaaggcgaagatacacgaaagaatcaaaagaatgattccagcgattagcacgccggaaaaataatttccaatcataagcatcatgtccatttaactaataaaaattttaaatcgccgaatgaacaaagtggaatataaaccatataaaaacaatagtttgtactgcaaaaataatatctatttttgttttcgaagatatggtaaaattaaatagtagtacacagcatgttataactaacagcagcaacggctcgtaattacttatcatttactagacgaaaaggtggtgggatattttcttgctcaaataatacgaatatatcacccatccattttatgcgatgtttatatactctaatctttaatagatctatagacgacgggtttaccaacaatatagattttatcgattcatctaatttaaacccttccttaaacgtgaatgatctattatctggcataacgatgaccctacctgatgaatcggacaatgtactgggccatgtagaataaattatcaacgaattatcgtctacgaacatttatatcatttgttttaattttaggacgcgaataaatggatataaaatagaaaataacagatattacaaccagtgttatggccgcgcccaaccaggtaggcagttttattttatcttttactacaggttctcctggatgtacgttaccaacggcggacgtagttctagtacaattagacgtaagttccgcttgggaattttttaacgctaaagagttaacgttaatcgtgcacccaacgtatttacatctagttcgttgaacatcttgattataatataaccattttctatctctagattcgtcagtgcactcatgtaaccaacataccctaggtcctaaatatttatctccggaattagattttggataattcgcgcaccaacaatttctatttcctttatgatcgttacaaaagacgtataatgccgtatccccaaaagtaaaataatcaggacgaataattctaataaactcagaacaatatctcgcatccatatgtttggagcaaatatcggaataagtagacatagccggtttccgttttgcacgtaaccattctaaacaattggggtttccaggatcgtttctacaaaatccagtcatgaaatcgtcacaatgttctgtcttgtaattattattaaatatttttggacagtgtttggtatttgtcttagaacaacattttgccacgctatcactatcgcccaggagataatccttttttataaaatgacatcgttgcccggatgctatataatcagtagcgtgttttaaatccttaatatattcaggagttacctcgttctgataatagattaatgatccaggacgaaatttgaaagaactacatggttctccatgaattaatacatattgtttagcaaattcaggaactataaaactactacaatgatctatcgacataccatctatcaaacaaaacttgggtttaatttctcccggagatgtttcataatagtacgtataactttcttctgcaaacttaacagctctattatattcaggataattaaaacctaattccatatatttgtctcgtatatctgctattcctggtgctattttgattctattaagagtaacagctgcccccattcttaataatcgtcagtatttaaactgttaaatgttggtatatcaacatctaccttatttcccgcagtataaggtttgttgcaggtatactgttcaggaatggttacatttatacttcttctatagtcctgtctttcgatgttcatcacatatgcaaagaacagaataaacaaaataatgtaagaaataatattaaatatctgtgaattcgtaaatacattgattgccataataattacagcagctacaatacacacaatagacattcccacagtgttgccattacctccacgatacatttgagttactaagcaataggtaataactaagctagtaagaggcaatagaaaagatgagataaatatcatcaatatagagattagaggagggctatatagagccaagacgaacaaaatcaaaccgagtaacgttctaacatcattatttttgaagattcccaaataatcattcattcctccataatcgttttgcatcatacctccatctttaggcataaacgattgctgctgttcctctgtaaataaatctttatcaagcactccagcacccgcagagaagtcgtcaagcatattgtaatatcttaaataactcatttatatattaaaaaatgtcactattaaagatggagtataatctttatgccgaactaaaaaaaatgacttgtggtcaacccctaagtctttttaacgaagacggggatttcgtagaagttgaaccgggatcatcctttaagtttctgatacctaagggattttacgcctctccttccgtaaagacgagtctagtattcgagacattaacaacgaccgataataaaatcactagtatcaatccaacaaatgcgccaaagttatatcctcttcaacgcaaagtcgtatctgaagtagtttctaatatgaggaaaatgatcgaatcaaaacgtcctctatacattactcttcacttggcgtgtggatttggtaagactattaccacgtgttatcttatggctacacacggtagaaaaaccgtcatttgcgtacccaataaaatgttaatacatcaatggaagacacaggtagaggcagtcggattggaacataagatatccatagatggagtaagtagtctattaaaggaactaaagactcaaagtccggatgtattaatagtagtcagtagacatctgacaaacgatgccttttgtaaatatatcaataagcattatgatttgttcatcttggatgaatcacatacgtataatctgatgaacaatacagcagttacaagatttttagcgtattatcctccgatgatgtgttattttttaactgctacacctagaccatctaaccgaatttattgtaacagtattattaatattgccaagttatccaatctaaaaaaaactatctatgcagtagatagtttttttgagccatattccacagataatattagacatatggtaaaacgactagatggaccatctaataaatatcatatatataccgagaagttattatctgtagacgagcctagaaatcaacttattcttgataccctggtagaagaattcaagtcaggaactattaatcgcattttagttattactaaactacgtgaacatatggtattattctacaaacgattattagattttttcggaccagaggttgtatttataggagacgcccaaaatagacgtactccagatatggtcaaatcaatcaaggaactaaatagatttatattcgtatccaccttattttattccggtactggtttagatattcctagtttggattcgttgttcatttgctcggcagtaatcaacaatatgcaaatagagcaattactagggagggtatgtcgagaaacagaactattagataggacggtatatgtatttcctaacacatccatcaaagaaataaagtacatgataggaaatttcatgcaacgaattattagtctgtctgtagataaactaggatttaaacaaaaaagttatcggaaacatcaagaatccgatcccacttctgtatgtacaacatcctccagagaagaacgtgtattaaatagaatatttaactcgcaaaatcgttaagaagtttaagcgacgatccgcatgctgcgcaggccagtgtattacccctcatagtattaatataatccaatgatacttttgtgatgtcggaaatcttaaccaatttagactgacaggcagaacacgtcatgcaatcatcatcgtcatcgataactgtagtcttgggcttctttttgcggctcttcattccggaacgcacattggtgctatccatttaggtagtaaaaaataagtcagaatatgccctataacacgatcgtgcaaaacctggtatatcgtctctatctttatcacaatatagtgtatcgacatttttattattattgacctcgtttatcttggaacatggaatgggaacatttttgttatcaacggccacctttgccttaattccagatgttgtaaaattataactaaacagtctatcatcgacacaaatgaaattcttgtttagacgtttgtagtttacgtatgcggctcgttcgcgtctcattttttcagatattgcaggtactataatattaaaaataagaatgaaataacataggattaaaaataaagttatcatgacttctagcgctgatttaactaacttaaaagaattacttagtctgtacaaaagtttgagattttcagattctgcggctatagaaaagtataattctttggtagaatggggaacatctacttactggaaaataggcgtgcaaaaggtagctaatgtcgagacgtcaatatctgattattatgatgaggtaaaaaataaaccgtttaatattgatccgggctattacattttcttaccggtatattttgggagcgtctttatttattcgaagggtaaaaatatggtagaacttggatctggaaactcttttcaaataccagatgatatgcgaagtgcgtgtaacaaagtattagacagcgataacggaatagactttctgagatttgttttgttaaacaatagatggataatggaagatgctatatcaaaatatcagtctccagttaatatatttaaactagctagtgagtacggattaaacatacccaaatatttagaaattgaaatagaggaagacacattatttgacgacgagttatactctattatagaacgctctttcgatgataaatttccaaaaatatccatatcgtatattaagttgggagaacttagacggcaagttgtagactttttcaaattctcattcatgtatattgagtccatcaaggtagatcgtataggagataatatttttattcctagcgttataacaaaatcaggaaaaaagatattagtaaaagatgtagaccatttaatacgatccaaggttagagaacatacatttgtaaaagtaaaaaagaaaaacacattttccattttatacgactatgatggaaacggaacagaaactagaggagaagtaataaaacgaattatagacactataggacgagactattatgttaacggaaagtatttctctaaggttggtagtgcaggcttaaagcaattgactaataaattagatattaatgagtgcgcaactgtcgatgagttagttgatgagattaataaatccggaactgtaaaacgaaaaataaaaaaccaatcagcatttgatttaagcagagaatgtttgggatatccagaagcggattttataacgttagttaataacatgcggttcaaaatagaaaattgtaaggttgtaaatttcaatattgaaaatactaattgtttaaataacccgagtattgaaactatatatggaaactttaaccagttcgtctcaatctttaatgtcgtcaccgatgtcaaaaaaagattattcgagtgaaataatatgcgcctttgatataggtgcaaaaaatcctgccagaactgttttagaagtcaaggataactccgttagggtattggatatatcaaaattagactggagttctgattgggaaaggcgcatagctaaagatttgtcacaatatgaatacactacagttcttctagaacgtcagcctagaaggtcgccgtatgttaaatttatctattttattaaaggctttttatatcatacatcggctgccaaagttatttgcgtctcgcctgtcatgtctggtaattcatatagagatcgaaaaaagagatcggtcgaagcatttcttgattggatggacacattcggattgcgagactccgttccggatagacgcaaattagacgatgtagcggatagtttcaatttggctatgagatacgtattagataaatggaatactaattatacaccttataataggtgtaaatctagaaattacataaaaaaaatgtaataacgttagtaacgccattatggataatctatttacctttctacatgaaatagaagatagatatgccagaactatttttaactttcatctaataagttgcgatgaaataggagatatatatggtcttatgaaagaacgcatttcctcagaggatatgtttgataatatagtgtataataaagatatacatcctgccattaagaaactagtgtattgcgacatccaacttactaaacacattattaatcagaatacgtatccggtatttaacgattcttcacaagtgaaatgttgtcattatttcgacataaactcagataatagcaatattagctctcgtacagtagagatatttgagagggaaaagtcatctcttgtatcatatattaaaactaccaataagaagagaaaggtcaattacggcgaaataaagaaaactgttcatggaggcactaatgcaaattacttttccggtaaaaagtctgacgagtatctgagtactacagttagatccaacattaatcaaccttggatcaaaaccatctctaagaggatgagagttgatatcattaatcactctatagtaacgcgtggaaaaagctctatattacaaactatagaaattatttttactaatagaacatgtgtgaaaatattcaaggattctactatgcacattattctatccaaggacaaggatgaaaaggggtgtatacacatgattgacaaattattctatgtctattataatttatttctgttgttcgaagatatcatccaaaacgagtactttaaagaagtagctaatgttgtaaaccacgtactcacggctacggcattagatgagaaattattcctaattaagaaaatggctgaacacgatgtttatggagttagcaatttcaaaatagggatgtttaacctgacatttattaagtcgttggatcataccgttttcccctctctgttagatgaggatagcaaaataaagttttttaaggggaaaaagctcaatattgtagcattacgatctctggaggattgtataaattacgtgactaaatccgagaatatgatagaaatgatgaaggaaagatcgactattttaaatagcatagatatagaaacggaatcggtagatcgtctaaaagaattgcttctaaaatgaaaaaaaacactaattcagaaatggatcaacgactagggtataagtttttggtgcctgatcctaaagccggagttttttatagaccgttacatttccaatatgtatcgtattctaattttatattgcatcgattgcatgaaatcttgaccgtcaagcggccactcttatcgtttaagaataatacagaacgaattatgatagaaattagcaatgttaaagtgactcctccagattactcacctataatcgcgagtattaaaggtaagagttatgacgcattagccacgttcactgtaaatatctttaaagaggtaatgaccaaagagggtatatccatcactaaaataagtagttatgagggaaaagattctcatttgataaaaattccgctactaataggatacgggaataaaaatccacttgatacagccaagtatcttgttcctaatgtcataggtggagtctttatcaataaacaatctgtcgaaaaagtaggaattaatctagtagaaaagattacaacatggccaaaatttagggttgttaagccaaactcattcactttctcgttttcctccgtatcccctcctaatgtattaccgacaagatatcgccattacaagatatctctggatatatcacaattggaagcgttgaatatatcatcgacaaagacatttataacggtcaatattgttttgctgtctcaatatttatctagagtgagtctagaattcattagacgtagtttatcatacgatatgcctccagaagttgtctatctagtaaacgcgataatagatagtgctaaacgaattactgaatctattactgactttaatattgatacatacattaatgacctggtggaagctgaacacattaaacaaaaatctcagttaacgattaacgagttcaaatatgaaatgctgcataactttttacctcatatgaactatacacccgatcaactaaagggattttatatgatatctttactaagaaagtttctctactgtatcttccacacttctagatatccagatagagattcgatggtttgtcatcgcatcctaacgtacggcaaatattttgagacgttggcacatgatgaattagagaattacataggcaacatccgaaacgatatcatgaacaatcacaagaacagaggcacttacgcggtaaacattcatgtactaacaactcccggacttaatcacgcgttttctagcttattgagtggaaagttcaaaaagtcagacggtagttatcgaacacatcctcactattcatggatgcagaatatttctattcctaggagtgttggattttatccggatcaagtaaagatttcaaagatgttttctgtcagaaaataccatccaagtcaatatctttacttttgttcatcagacgttccggaaagaggtcctcaggtaggtttagtatctcaattgtctgtcttgagttccattacaaatatactaacgtctgagtatttggatttggaaaagaaaatttgtgagtatatcagatcatattataaagatgatataagttactttgaaacaggatttccaatcactatagaaaatgctctagtcgcatctcttaatccaaatatgatatgtgattttgtaactgactttagacgtagaaaacggatgggattcttcggtaacttggaggtaggtattactttagttagggatcacatgaatgaaattcgcattaatattggagcgggaagattagtcagaccattcttggttgtggataacggagagctcatgatggatgtgtgtccggagttagaaagcagattagacgacatgacattctctgacattcagaaagagtttccgcatgtcatcgaaatggtagatatagaacaatttacttttagtaacgtatgtgaatcggttcaaaaatttagaatgatgtcaaaggatgaaagaaagcaatacgatttatgtgactttcctgccgaatttagagatggatatgtagcatcttcactagtgggaatcaatcacaattctggacccagagctattcttggatgtgctcaagctaaacaagctatctcttgtctgagttcggatatacgaaataaaatagacaatggaattcatttgatgtatccagagaggccaatcgtgattagtaaggctttagaaacttcaaagattgcggctaattgcttcggccaacatgttactatagcattaatgtcgtacaaaggtatcaatcaagaggatggaattatcatcaaaaaacaatttattcagagaggcggtctcgatattgttacagccaagaaacatcaagtagaaattccattggaaaactttaataacaaagaaagagataggtctaacgcctattcaaaattagaaagtaatggattagttagactgaatgctttcttggaatccggagacgctatggcacgaaatatctcatcaagaactcttgaagatgattttgctagagataatcagattagctttgatgtttccgagaaatataccgatatgtacaaatctcgcgttgaacgagtacaagtagaacttactgacaaagttaaggtacgagtattaaccatgaaagaaagaagacccattctaggagacaaatttaccactagaacgagtcaaaagggaacagtcgcgtatgtcgcggatgaaacggaacttccatacgacgaaaatggtatcacaccagatgtcattattaattctacatccatcttctctagaaaaactatatctatgttgatagaggttattttaacagccgcatattctgctaagccgtacaacaataagggagaaaaccgacctgtctgttttcctagtagtaacgaaacatccatcgatacatatatgcaattcgctaaacaatgttatgagcattcaaatccgaaattgtccgatgaagaattatcggataaaatcttttgtgaaaagattctctatgatcctgaaacggataagccttatgcatccaaagtattttttggaccaatttattacttgcgtctgaggcatttaactcaggacaaggcaaccgttagatgtagaggtaaaaagacgaagctcattagacaggcgaatgagggacgaaaacgtggaggaggtatcaagttcggagaaatggagagagactgtttaatagcgcatggtgcagccaatactattacagaagttttgaaagattcggaagaagattatcaagatgtgtatgtttgtgaaaattgtggagacatagcagcacaaatcaagggtattaatacatgtcttagatgttcaaaacttaatctctctcctctcttaacaaaaattgataccacgcacgtatctaaagtatttcttactcaaatgaacgccagaggcgtaaaagtcaaattagatttcgaacgaaggcctccttcgttttataaaccattagataaagttgatctcaagccgtcttttctggtgtaatattctagtttggtagtagatacatatcaatatcatcaaattcgagatccgaattataaaatgggcgtggattgttaactatagaatcggacgtctgatattcgaaaatctgtggagtttcaggttttggtggaggtgtaactgctacttgggatactgaagtctgatattcagaaagctgtggatgttctggttcggcatccaccgatggtgtcacatcactaatcggttcggtaacgtctgtggatggaggtgctacttctacagaacctgtagcctcagttgtcaacggagatacatttttaatgcgagaaaatgtataatttggtaatggtttcttatgtggatctgaagaagaggtaagatatctactagaaagataccgatcacgttctagttctcttttgtagaacttaactttttctttctccgcatctagttgatattccaacctcttcacgttactacgttcagattccaattcacgttcgcatgggttacctccgcagtttttacgagcgatttcacgttcagccttcatgcgtctctccctctctctatcgagtttatcagagcagtctttctgaaggcgatcgaactccataaatttctccaacgctttgattgtttccatagatttccgaagttcagcttttaggactgtgattctttttctttcgaattcacagctggatgtacaaccgtttccattaccgccatctctaagtttcttttctagatcggcaacatttcatccccatgccttttacattcctcgagtctactgtcgtcgaaatatcgttccagctccttttcgacatcaataactttagcacgttgtctctcaagctctcttttgtagttatctgattccctggcacgtttaagatcttcatgcaattgagtcagctcttaacttcctctcttgcttcttcgtcatagtacgcgcaatcactgtgagatccattgttaccacgtctacactcggcgagctcgcgtttaagagattcaatttcccgtttgtattggtccatgtttccattgctaccaccattagatttacaggctgctagttgtcgttcgagatcagaaatacgggttttcttggaattgatttcgtcgatgtacttggcatcgaaacacttattaagttctttttccaattctacgattttatttctttcgcgagtcaattccctcctgtagtaactatctgttttgtcagattcacgctctctacgtagactttcttgcaagttactaatttgttccctagcacgtccgagtttagttttatatgctgaatagagttctgattcatcctttgagcagatctctagcgatcgtttaagattcctaattctagtctttagcctatttacctcctcagaagatgttccgttaccgttgcgtttacactcgttaagctgtctatcaagatccatgattctatctctaagacgttgcatctctctttccatatcagcattgctttcattattacgtctgcagtcactcaactgtctttcaatatctgagattctatctctaagacgtcgcatctctctctgtttcggcattggtttcattattacgtttacagtcgttcaactgtctttcaagatctgatattctagattggagtctgctaatctctgtagcattttcacggcattcactcagttgtctttcaagatctgaaattttagattggagtctgctaatctctgtaagatttcctcctccgctctcgatgcagtcggtcaacttattctctagttctctaatacgcgaacgcagtgcatcaacttcttgcgtgtcttcctggttgcgtgtacattcatcgagatctctaacgcgtcgtcgttcttcctcaagttctctgcgtactacagaaagcgtgtccttatcttgttgatatttagcaatttctgattctagagtactgattttgcttacgtagttactaatatttgtcttggccttatcaagatcctccttgtatttgtcgcattccttgatatccctacgaagtctggacagttcccattcgacattacgacgtttatcgatttcagctcggagatcgtcatcgcgttgttttagccacatacgactgagttcaagttctcgttgacaagatccatctacttttccattcctaatagtatccagttccttttctagttctgaacgcatttctcgttccctatcaagcgattctctcaattctcggatagtcttcttatcaatttctaataaatctgaaccatcatctgtcccattttgaatatccctgtgttctttgatctcttttgtaagtcggtcgattctttcggttttataaacagaatccctttccaaagtcctaatcttactgagtttatcactaagttctgcattcaattcggtgagttttctcttggcttcttccaactctgttttaaactctccactatttccgcattcttcctcgcatttatctaaccattcaattagtttattaataactagttggtaatcagcgattcctatagccgttcttgtaattgtgggaacataattaggatcttctaatggattgtatggcttgatagcatcatctttatcattattagggggatggacaaccttaattggttggtcctcatctcctccagtagcgtgtggttcttcaataccagtgttagtaataggcttaggcaaatgcttgtcgtacgcgggcacttcctcatccatcaagtatttataatcgggttctacttcagaatattcttttctaagagacgcgacttcgggagttagtagaagaactctgtttctgtatctatcaacgctggaatcaatactcaagttaaggatagcgaatacctcatcgtcatcatccgtatcttctgaaacaccatcatatgacatttcatgaagtctaacgtattgataaatagaatcagatttagtattaaacagatccttaacctttttagtaaacgcatatgtatattttagatctccagatttcataatatgatcacatgccttaaatgtcagtgcttccatgatataatctggaacactaatgggtgacgaaaaagatacagcaccatatgctacgttgataaataaatctgaaccactaagtagataatgattaatgttaaggaaaagaaaatattcagtgtataggtatgtcttggcgtcatatcttgtactaaacacgctaaacagtttgttaatgtgatcaatttccaatagattaattagagcagcgggaataccaacaaacatattaccacatccgtattttctatgaatatcacatatcatgttaaaaaatcttgatagaagagcgaatatctcgtctgacttaatgagtcgtagttcagcagcaacataagtcataactgtaaatagaacatactttcctgtagtgttgattctagactccacatcaacaccattattaaaaatagttttatatacatctttaatctgctctccgttaatcgtcgaacgttctagtatacggaaacactttgatttcttatctgtagttaatgacttagtgatatcacgaagaatattacgaattacatttcttgtttttcttgagagacctgattcagaactcaactcatcgttccatagtttttctacctcagtggcgaaatctttggagtgcttggtacatttttcaataaggttcgtgacctccatttattataaaaaatttattcaaaacttaactacaatcgggtaattataaaatcgtagatctcccatgtggcggaatactaccatctatcgcatgtggatggacagtaggtaatggccatgggaacagtaatgtttgcatatttatctttcttgccagtattactgcatattgtcccaatgtttcgatgtgatgttctaacctatcaactgccgctgtatcacaacaatagtgtccgatgaaattaagattatgatccaatgtgtttaatatatgattatcaagtcttatacgatccgcgtcttttttgacaggatcaggttcttctacaggaagaagtttcggcctcttatgatattcatgtctgggaaacggtggtctagggtgaggctccggtatcggagtgggttttggattataatcatcatcgtctatgacatcatcttcgacttcgatatttattttgctatcttgatgatgtcctgtatcagttgcattttcagcactcgactgaatattagcgcattcattgtctattattaccatatttctaaacccaaaatgtatgtgttgaacatcagtactatcgttgatgagtcttatagcatgaattcgcttatcgttatcgggtttatcttctgtcaccttagcaattccttttttattaaactctacataatcatatccatttctattgtttgttctaatataaacgagtatagcatcattgctaaatttttcaatagtatcaaaaacagaatatcctaaaccatataatatatattcaggaacactcaaactaaatgtccaggattctcctaaatacgtaaactttaatagtgcgaaatcattcaaaaatctaccacttatagatagatagtacataaatgcgtatagtagtctacctatctctttattatgaaaaccggcattacgatcatatatgtcgtgatatacctgtgatccgtttacgttaaaccataaatacatgggtgatcctataaacatgaatttatttctaattctcagagctatagttaattgaccgtgtaatatttgcttacatgcatacttgatacgcttattaataagatttttatcattgctcgttatttcagaatcgtatatataaggagtaccatcgtgattcttaccagatattatacaaaatactatatataaaatatattgacccacgttagtaatcatataaatgtttaacgttttaaattttgtattcaatgatccattatcatacgctatcatggtcttgtaatattcattctttaaaatataatattgtgttagccattgcattggggctcctaatggagattttttattctcatccattttaggataggctttcataaagtccctaataacttcgtgaataatgtttctatgttttctactgatgcatgtatttgcttcgatttttttatcccatgtttcatctatcatagatttaaacgcagtaatgctcgcaacattaacatcttgaaccgttggtacaattccgttccataaatttataatgttcgccatttatataactcattttttgaatatacttttaattaacaaaagagttaagttactcatatggacgccgtccagtctgaacatcaatctttttagccagagatatcatagccgctcttagagtttcagcgtgattttccaacctaaatagaacttcatcgttgcgtttacaacacttttctatttgttcaaactttgttgttacattagtaatctttttttccaaattagttagccgttgtttgagagtttcctcattgtcgtcttcatcggctttaacaattgcttcgcgtttagcctctggctttttagcagcctttgtagaaaaaaattcagttgctggaattgcaagatcgtcatctccggggaaaagagttccgtccatttaaagtacagattttagaaactgacactctgcgttatttatatttggtacaacacatggattataaatattgatgttaataacatcagaaaatgtaaagtctatacattgttgcatcgtgttaaattttctaatggatctagtattattgggtccaacttctgcctgaaatccaaatatggaagcggatacaaaaccgtttcctggataaaccacacatctccacttttgctttacatcagaaattgtgtcgttgacatcttgaactctcctatctaatgccggtgttccacctatagattttgaatattcgaatgctgcatgagtagcattaaattccttaatattgccataattttcatatattgagtaaccctggataaaaagtaaacacaccgcagccgtcgctaccacaataaaaaaaattgatagagagttcatttataatctattagaagctgacaaaatttttttacacgcatcagacaatgctttaataaatagttcaacatctacttttgtcatatcgaaccgatggtatgattctaacctagaattacatccgaaaaagttgactatgttcatagtcattaagtcattaacaaacaacattccagactctggattataagacgatactgtttcgtcacaattacctaccttaatcatgtgattatgaatattggctattagagcaccttctaagaaatctataatatctttgaaacacgatttaaaatcaaaccacgaatatacttctacgaagaaagttagtttacccataggagaaataactataaatggagatctaaatacaaaatccggatctatgatagttttaacattattatattctctattaaatacctccacatctaaaaatgttaattttgaaactatgtcttcgtttattaccgtacctgaactaaacgctataagctctattgtttgagaactctttaaacgatattcttgaaatacatgtaacaaagtttcctttaactcggtcggtttatctaccatagttacagaatttgtatccttatctataatataataatcaaaatcgtataaagttatataattatcgcgttcagattgggatcttttcaaatagactaaaaaccccatttctctagtaagtatcttatgtatatgtttgtaaaatatcttcatggtgggaatatgctctaccgcagttagccattcctcattgacagcggtagatgtattagacaaaactattccaatgtttaacaagggccattttacgagattattaaatccttgtttgataaatgtagccaatgagggttcgagttcaacgacgattgaattctcttcccgcggatgctgcatgatgaacgacgggatgttgttcgattgatttggaattctttttcgactttttgtttatattaaatattttaaaatttatagcggatagcaattcatgtaccacggataatgtagacgcgtattgcgcatcgatatctttattattagataaatttatcaataaatgtgagaagtttgcctcgttaaggtcttccatttaaatattatataaacatttgtgtttgtaacttattcgtcttttatggaatagttttttactagtaaagctgcaattacacactttgtccgtaaaacataaatataaacaccagcttttatcaatcgttccaaaaagtcgacggcggacatttttaacatggcatctattttaaatacacttaggtttttggaaaaaacatcattttataattgtaacgattcaataactaaagaaaagattaagattaaacataagggaatgtcatttgtattttataagccaaagcattctaccgttgttaaatacttgtctggaggaggtatatatcatgatgatttggttgtattggggaaggtaacaattaataatctaaagatgatgctattttacatggatttatcatatcatggagtgacaagtagtggagcaatttacaaattgggatcgtctatcgatagactttctctaaataggactattgttacaaaagttaataattatgatgatacattttttgacgacgatgattgatcgctattgcacaattttgtttttgtactttctaatatagtgtttaggttctttttcatatgagaatattgatttactaaaatatctatgtttaacttttgttctatgacgtccttatcggcggtatcggtacatatacgtaattcaccttcacaaaatacggagtcttcgataataatagccaatcgattattggatctagctgtctgtatcatattcaacatgtttaatatatcctttcgtttcccctttacaggcatcgatcgtagcatattttccgcgtctgatatggaaatgttaaaactacaaaaatgcgtaatgttagcccgtcctaatattggtacgtgtctataagtttggcatagtagaataatagacgtgtttaaatgccttccaaagtttaagaattctattagagtattgcattttgatagtttatcgcctacatcatcaaaaataagtaaaaagtgtgctgattttttatgattttgtgcgacagcaatacatttttctatgttacttttagttcgtatcagattatattctagagattcctgactactaacgaaattaatatgatttggccaaatgtatccatcataatctgggttataaacgggtgtaaacaagaatatatgtttatattttttaactagtgtagaaaacagagatagtaaatagatagtttttccagatccagatcctcctgttaaaaccattctaaacggcatttttaataaattttctcttgaaaattgtttttcttggaaacaattcataattatatttacagttactaaattaatttgataataaatcaaaatatggaaaactaaggttgttagtagggaggagaacaaagaaggcacatcgtgatataaataacatttattatcatgatgacaccagaaaacgacgaagagcagacatctgtgttctccgctactgtttacggagacaaaattcagggaaagaataaacgcaaacgcgtgattggtctatgtattagaatatctatggttatttcactactatctatgattaccatgtccgcgtttctcatagtgcgcctaaatcaatgcatgtctgctaacgaggctgctattactgacgccgctgttgccgttgctgctgcatcatctactcatagaaaggttgcgtctagcactacacaatatgatcacaaagaaagctgtaatggtttatattaccagggttcttgttatatattacattcagactaccagttattctcggatgctaaagcaaattgcactgcggaatcatcaacactacccaataaatccgatgtcttgactacctggctcattgattatgttgaggatacatggggatctgatggtaatccaattacaaaaactacatccgattatcaagattctgatgtatcacaagaagttagaaagtatttttgtgttaaaacaatgaactaatatttatttttgtacattaataaatgaaatcgcttaatagacaaactgtaagtaggtttaagaagttgtcggtgccggccgctataatgatgatactctcaaccattattagtggcataggaacatttctgcattacaaagaagaactgatgcctagtgcttgcgccaatggatggatacaatacgataaacattgttatttagatactaacattaaaatgtctacagataatgcggtttatcagtgtcgtaaattacgagctagattgcctagacctgatactagacatctgagagtattgtttagtattttttataaagattattgggtaagtttaaaaaagaccaatgataaatggttagatattaataatgataaagatatagatattagtaaattaacaaattttaaacaactaaacagtacgacggatgctgaagcgtgttatatatacaagtctggaaaactggttaaaacagtatgtaaaagtactcaatctgtactatgtgttaaaaaattctacaagtgacaacaaaaaatgaattaataataagtcgttaacgtacgccgccatggacgccgcgtttgttattactccaatgggtgtgttgactataacagatacattgtatgatgatctcgatatctcaatcatggactttataggaccatacattataggtaacataaaaactgtccaaatagatgtacgggatataaaatattccgacatgcaaaaatgctactttagctataagggtaaaatagttcctcaggattctaatgatttggctagattcaacatttatagcatttgtgccgcatacagatcaaaaaataccatcatcatagcatgcgactatgatatcatgttagatatagaagataaacatcagccattttatctattcccatctattgatgtttttaacgctacaatcatagaagcgtataacctgtatacagctggagattatcatctaatcatcaatccttcagataatctgaaaatgaaattgtcgtttaattcttcattctgcatatcagacggcaatggatggatcataattgatgggaaatgcaatagtaattttttatcataaaagttgtaaagtaaataataaaacaataaatattgaactagtagtacgtatattgagcaatcagaaatgatgctggtacctcttatcacggtgaccgtagttgcgggaacaatattagtatgttatatattatatatttgtaggaaaaagatacgtactgtctataatgacaataaaattatcatgacaaaattaaaaaagataaagagttctaattccagcaaatctagtaaatcaactgatagcgaatcagactgggaggatcactgtagtgctatggaacaaaacaatgacgtagataatatttctaggaatgagatattggacgatgatagcttcgctggtagtttaatatgggataacgaatccaatgttatggcgcctagcacagaacacatttacgatagtgttgctggaagcacgctgctaataaataatgatcgtaatgaacagactatttatcagaacactacagtagtaattaatgaaacggagactgttgaagtacttaatgaagataccaaacagaatcctaactattcatccaatcctttcgtaaattataataaaaccagtatttgtagcaagtcaaatccgtttattacagaacttaacaataaatttagtgagaataatccgtttagacgagcacatagcgatgattatcttaataagcaagaacaagatcatgaacacgatgatatagaatcatcggtcgtatcattggtgtgattagtttcctttttataaaattgaagtaatatttagtattattgctgccgtcacgttgtacaaatggagatattccctgtattcggcatttctaaaattagcaattttattgctaataatgactgtagatattatatagatacagaacatcaaaaaattatatctgatgagatcaatagacagatggatgaaacggtacttcttaccaacatcttaagcgtagaagttgtaaatgacaatgagatgtaccatcttattcctcatagattatcgacgattatactctgtattagttctgtcggaggatgtgttatctctatagataatgacatcaatggcaaaaatattctaacctttcccattgatcatgctgtaatcatatccccactgagtaaatgtgtcgtagttagcaagggtcctacaaccatattggttgttaaagcggatatacctagcaaacgattggtaacatcgtttacaaacgacatactatatgtaaacaatctgtcactgattaattatttgccgttgtctgtattcattattagacgagtcaccgactatttggatagacacatatgcgatcagatatttgctaataataagtggtattcccttataaccatcgacgataagcaatatcctattccatcaaactgtataggtatgtcctctgccaagtacataaattctagcatcgagcaagatactttaatccatgtttgtaacctcgagcatccgttcgactcagtatacaaaaaaatgcagtcgtacaattctctacctatcaaggaacaaatattgtacggtagaattgataatataaatatgagcattagtatttctgtggattaatagatttctagtatggggatcattaatcatctctaatctctaaatacctcataaaacgaaaaaaaagctattatcaaatactgtacggaatggattcattctcttctctttttatgaaactctgttgtatatctactgataaaactggaagcaaaaaatctgatagaaagaataagaataagatcaaggattatatggaacacgattattataaaataacaatagttcctggttcctcttccacgtctactagctcgtggtattatacacatgcctagtaatagtctctttgcgttgacggaaagcagactagaaataacaggctaaaatgttcagacaccataatagttcccaacccagataataacagagttccatcaacacattcctttaaactcaatcccaaacccaaaaccgttaaaatgtatccggccaattgatagtagataatgaggtgtacagcgcatgataatttacacagtaaccaaaatgaaaatactttagtaattataagaaatatagacggtaatgtcatcatcaacaatccgataatatgcctgagagtaaacattgacggataaaacaaaaatgctccgcataactctatcatggcaataacacaaccaaatacttgtaagattcctaaattagtagaaaatacaacgaatatcgatgtataagtgatctcgagaaataataagaataaagtaatgcccgtaaagataaacatcaacattgtttggtaatcattaaaccaattagtatgaagttgaactaatttcacagtagattttattccagtgttatcctcgcatgtataagtacctggtaagatatctttatattccataatcaatgagacatcactatctgataacgaatgaagtctagcactagtatgccatttacttaatattgtcgtcttggaagttttattataagttaaaatatcatggttatccaatttccatctaatatactttgtcggattatctatagtacacggaataatgatggtatcattacatgctgtatactctatggtctttgtagttgttataacaaccaacgtatagaggtatatcaacgatattctaactcttgacattttttatttatttaaaatgatacctttgttatttattttattctattttgctaacggtattgaatggcataagtttgaaacgagtgaagaaataatttctacttacttattagacgacgtattatacacgggtgttaatggggcggtatacacattttcaaataataaactaaacaaaactggtttaactaataataattatataacaacatctataaaagtagaggatgcggataaggatacattagtatgcggaaccaataacggaaatcccaaatgttggaaaatagacggttcagacgacccaaaacatagaggtagaggatacgctccttatcaaaatagcaaagtaacgataatcagtcacaacggatgtgtactatctgacataaacatatcaaaagaaggaattaaacgatggagaagatttgacggaccatgtggttatgatttattcacggcggataacgtaattccaaaagatggtttacgaggagcattcgtcgataaagatggtacttatgacaaagtttacattcttttcactgatactatcggctcaaagagaattgtcaaaattccgtatatagcacaaatgtgcctaaacgacgaaggtggtccatcatcattgtctagtcatagatggtcgacgtttctcaaagtcgaattagaatgtgatatcgacggaagaagttatagacaaattattcattctagaactataaaaacagataatgatacgatactatatgtattcttcgatagtccttattccaagtccgcattatgtacctattctatgaataccattaaacaatctttttctacgtcaaaattggaaggatatacaaagcaattgccgtctccagctcctggtatatgtttaccagctggaaaagttgttccacataccacgtttgaagtcatagaacaatataatgtactagatgatattataaagcctttatctaaccaacctatcttcgaaggaccgtctggtgttaaatggttcgatataaaggagaaggaaaatgaacatcgggaatatagaatatacttcataaaagaaaattctatatattcgttcgatacaaaatctaaacaaactcgtagctcgcaagtcgatgcgcgactattttcagtaatggtaactgcgaaaccgttatttatagcagatatagggataggagtaggaatgccacaaatgaaaaaaatacttaaaatgtaatcttaatcgagtacaccacacgacaatgaacaaacataagacagattatgctggttatgcttgctgcgtaatatgcggtctaattgtcggaattatttttacagcgacactattaaaagttgtagaacgtaaattagttcatacaccattaatagataaaacgataaaagatgcatatattagagaagattgtcctactgactggataagctataataataaatgtatccatttatctactgatcgaaaaacctgggaggaaggacgtaatgcatgcaaagctctaaatccaaattcggatctaattaagatagagactccaaacgagttaagttttttaagaagccttagacgaggctattgggtaggagaatccgaaatattaaaccagacaaccccatataattttatagctaagaatgccacgaagaatggaactaaaaaacggaaatatatttgtagcacaacgaatactcccaaactgcattcgtgttacactatataacaattacactacatttttatcataccactacttcggttagatgttttagaaaaaaataaatatcgccgtaccgttcttgtttttataaaaataacaattaacaattatcaaattttttctttaatattttacgtggttgaccattcttggtggtaaaataatctcttagtgttggaatggaatgctgtttaatgtttccgcactcatcgtatattttgacgtatgcagtcacatcgtttacgcaatagtcagactgtagttctatcatgcttcctacatcagaaggaggaacagttttaaagtctcttggttttaatctattaccgttagttttcatgaaatcctttgttttatccacttcacattttaaataaatgtccactatacattcttttgttaattttactagatcgtcatgggtcatagaatttataggttccgtagtccatggatccaaactagcaaacttcgcgtatacggtatcgcgattagtgtatacaccaactgtatgaaaattaagaaaacagtttaataaatcaacagaaatatttaatcctccgtttgatacagatgcgccatatttatggatttcggattcacacgttgtttgtctgaggtgttcgtctagtgttgcttctacgtaaacttcgattcccatatattctttattgtcagaatcgcataccgatttatcatcatacactgtttgaaaactaaatggtatacacatcaaaataataaataataacgagtacattctgcaatattgttatcgtaattggaaaaatagtgttcgagtgagttggattatgtgagtattggattgtatattttattttatattttgtaataagaataaaatgctaatgtcaagtttattccaatagatgtcttattaaaaacatatataataaataacaatggctgaatggcataaaattatcgaggatatctcaaaaaataataagttcgaggatgccgccatcgttgattacaagactacaaagaatgttctagctgctattcctaacagaacatttgccaagattaatccgggtgaaattattcctctcatcactaatcgtaatattctaaaacctcttattggtcagaaatattgtattgtatatactaactctctaatggatgagaacacgtatgctatggagttgcttactgggtacgcccctgtatctccgatcgttatagcgagaactcataccgcacttatatttttgatgggtaagccaacaacatccagacgtgacgtgtatagaacgtgtagagatcacgctacccgtgtacgtgcaactggtaattaaaataaaaagtaatattcatatgtagtgtcaattttaaatgatgatgatgaaatggataatatccatattgacgatgtcaataatgccggtattggcatacagttcatcgatttttagatttcattcagaggatgtggaattatgttatgggcatttgtattttgataggatctataatgtagtaaatataaaatataatccgcatattccatatagatataattttattaatcacacgttaaccgtagatgaactagacgataatgtcttttttacacatggttattttttaaaacacaaatatggttcacttaatcctagtttgattgtctcattatcaggaaacttaaaatataatgatatacaatgctcagtaaatgtatcgtgtctcattaaaaatttggcaacgagtacatctactatattaacatctaaacataagacttattctctacatcggtccacgtgtattactataataggatacgattctattatatggtataaagatataaatgacaagtataatgacatctatgattttactgcaatatgtatgctaatagcgtctacattgatagtgaccatatacgtgtttaaaaaaataaaaatgaactcttaattatgctatgctattagaaatggataaaatcaaaattacggttgattcaaaaattggtaatgttgttaccatatcgtataacttggaaaagataactattgatgtcacacctaaaaagaaaaaagaaaaggatgtattattagcgcaatcagttgctgtcgaagaggcaaaagatgtcaaggtagaagaaaaaaatattatcgatattgaagatgacgatgatatggatgtagaaagcgcgtaatacgatctataaaaataagtatataaatactttttatttactgtactcttactgtgtagtggtgataccctactcgattatttttttaaaaaaaaaatacttattctgattcttctagccatttccgtgttcgtttgaatgccacatcgacgtcaaagataggggagtagttgaaatctagttctgcattgttggtacgcacctcaaatgtagtgttggatatcttcaacgtatagttgttgagtagtgatggttttctaaatagaattctcttcatatcattcttgcacgcgtacatttttagcatccatcttggaatcctagatccttgttctattcccaatggtttcatcaatagaagattaaacatatcgtacgaacacgatggagagtaatcgtagcaaaagtaagcatttcctttaatcttagatcccggatactggatatattttgcagccaacacgtgcatccatgcagcatttcctacatatacccggctatgcaccgcgtcatcatcgactgtacgatacataatgttaccgtgttgcttacattgctcgtaaaagactttcatcaatttgtctccttctccgtaaattccagtgggtcttaggcaacaagtatacaattttgctccattcatgattacggaattattggctttcataaccagttgctcggccatacgtttactttttgcgtatacatgtcctggtgatatatcataaagggtatgctcatggccgatgaatggatcaccgtgtttattgggtcctattgcttccatgctactagtatagatcaaatacttgattcctaggtccacacaagctgccaaaatagtctgtgttccataatagtttactttcatgatttcattatcggtgtattttccaaatacatccactagagcagccgtatgaataatcagatttaccccatctagcgcttctctcaccttatcaaagtcgtttatatcacattgtatatagtttataaccttaactttcgaggttattggttgtggatcttctacaatatctatgactctgatttcttgaacatcatctgcactaattaacagttttactatatacctgcctagaaatccggcaccaccagtaaccgcgtacacggccattgctgccactcataatatcagactacttattctattttactaaataatggctgtttgtataatagaccacgataatatcagaggagttatttactttgaaccagtccatggaaaagataaagttttaggatcagttattggattaaaatccggaacgtatagtttgataattcatcgttacggagatattagtcaaggatgtgattccataggcagtccagaaatatttatcggtaacatctttgtaaacagatatggtgtagcatatgtttatttagatacagatgtaaatatatttacaattattggaaaggcgttatctatttcaaaaaatgatcagagattagcgtgtggagttattggtatttcttacataaatgaaaagataatacattttcttacaattaacgagaatggcgtttgatatatcagttaatgcgtctaaaacaataaatgcattagtttacttttctactcagcaaaataaattagtcatacgtaatgaagttaatgatacacactacactgtcgaatttgatagggacaaagtagttgacacgtttatttcatataatagacataatgacaccatagagataagaggggtgcttccagaggaaactaatattggttgcgcggttagtatgacttacttgtataataagtatagttttaaactgattttagcagaatatataagacacagaaatactatatccggcaatatttattcggcattgatgacactagatgatttggctattaaacagtatggagacattgatctattatttaatgagaaacttaaagtagactccgattcgggactatttgactttgtcaactttgtaaaggatatgatatgttgtgattctagaatagtagtagctctatctagtctagtatctaaacattgggaattgacaaataaaaaatataggtgtatggcattagccgaacatatatctgatagtattccaatatctgagctatctagactacgatacaatctatgtaagtatctacgcggacacactgagagcatagaggataaatttgattattttgaagacgatgattcgtctacatgttctgccgtaaccgacagggaaacggatgtataattttttttatagcgtgaaggatatgataaaaaatataattgttgtatttatcccattccaatcaccttatatgattctgtaacacaataaaggagtcttatagatgtatagaggtcagatactggtttgataaactgtttattccacataagtatgtttgactttatggttagacccgcatactttaacaaatcactgaaaattggagttaggtattgacctctcagaatcagttgccgttctggaacattaaatgtattttttatgatatactccaacgcatttatgtgggcatacaacaagtcattactaatggaatattccaagagttttagttgtctagtatttaacaagagaagagatttcaacagactgtttatgaactcgaatgccgcctcattgtcgcttatattgatgatgtcgaattctcccaatatcatcaccgatgagtagctcatcttgttatcgggatccaagttttctaaagatgtcattaaaccctcgatcatgaatggatttatcatcatcgtttttatgttggacatgagcttagtccgtttgtccacatctatagaagatgatttctgaattatttcatatatctctctctttaactccaggaacttgtcaggatggtctactttaatatgttctcgtctaagagatgaaaatctttggatggttgcacgcgacttttctctaaaggatgacgttgcccaagatcctctcttaaatgaatccatcttatccttggacaagatggacagtctattttccttagatggtttaatatttttgttacccatgatctataaaggtagacctaatcgtctcggatgaccatatatttattttcagttttattatacgcataaattgtaaaaaatatgttaggtttacaaaaatgtctcgtggggcattaatcgtttttgaaggattggacaaatctggaaaaacaacacaatgtatgaacatcatggaatctataccggcaaacacgataaaatatcttaactttcctcagagatccactgtcactggaaaaatgatagatgactatctaactcgtaaaaaaacctataatgatcatatagttaatctattattttgtgcaaatagatgggagtttgcatcttttatacaagaacaactagaacagggaattactttaatagttgatagatacgcattttctggagtagcgtatgccgccgctaaaggcgcgtcaatgactctcagtaagagttatgaatctggattgcctaaacccgacttagttatattcttggaatctggtagcaaagaaattaatagaaacgtcggtgaggaaatttatgaagatgttacattccaacaaaaggtattacaagaatataaaaaaatgattgaagaaggagatattcattggcaaattatttcttctgaattcgaggaagatgtaaagaaggagttgattaagaatatagttatagaggctatacacacggttactggaccagtggggcaactgtggatgtaatagtgaaattacattttttataaatagatgttagtacagtgttataaatggatgaagcatattactctggcaacttggaatcagtactcggatacgtgtccgatatgcataccgaactcgtatcaatatctcaattagttattgccaagatagaaactatagataatgatatattaaacaaggacattgtaaattttatcatgtgtagatcaaacttggataatccatttatctctttcctagatactgtatatactattatagatcaagagatctatcagaccgaattgattaattcattagacgacaatgaaattatcgattgtatagttaataagtttatgagcttttataaggataacctagaaaatatagtagatgctatcattactctaaaatatataatgaataatccagattttaaaactacgtatgcagaagtactcggttccagaatagccgatatagatattaaacaagtgatacgtaagaatatactacaattgtctaataatatccgcgaacgatatttgtgaaaatattaaaaaaaaatactttttttattaaatgacgtcgcttcgcgaatttagaaaattatgctgtgatatatatcacgcatcaggatataaagaaaaatctaaattaattagagactttataacagatagggatgataaatatttgatcattaagctattgcttcccggattagacgatagaatttataacatgaacgataaacaaattataaaattatatagtataatatttaaacaatctcaggaagatatgctacaagatttaggatacggatatataggagacactattaggactttcttcaaagagaacacagaaatccgtccacgagataaaagcattttaactttagaagaagtggatagttttttaactacgttatcatccgtaactaaagaatcgcatcaaataaaattattgactgatgtagcatccgtttgtacatgtaatgatttaaaatgtgtagtcatgcttattgataaagatctaaaaattaaagcgggtcctcggtacgtacttaacgctattagtcctaatgcctatgatgtgtttagaaaatctaataacttgaaagagataatagaaaatgcatctaaacaaaatctagactctatatctatttctgttatgactccaattaatcccatgttagcggaatcgtgtgattctgtcaataaggcgtttaaaaaatttccatcaggaatgtttgcggaagtcaaatacgatggtgaaagagtacaagttcataaaaataataacgagtttgccttctttagtagaaacatgaaaccagtactctctcataaagtggattatctcaaagaatacataccgaaagcatttaaaaaagctacgtctatcgtattggattctgaaattgttcttgtagacgaacataatgtaccgctcccgtttggaagtttaggaatacacaaaaagaaagaatataaaaactctaacatgtgtttgttcgtgtttgactgtttgtactttgatggattcgatatgacggacattccattgtacgaacgaagatcttttctcaaagatgttatggttgaaatacccaatagaatagtattctcagagttgacgaatattagtaacgagtctcagttaactgacgtattggatgatgcactaacgagaaaattagaaggattggtcttaaaagatattaatggagtatacgaaccgggaaagagaagatggttaaaaataaagcgagactatttgaacgagggttccatggcagattctgccgatttagtagtactaggtgcttactatggtaaaggagcaaagggtggtatcatggcagtctttctaatgggttgttacgacgataaatccggtaaatggaagacggttaccaagtgttcaggacacgatgataatacgttaagggagttgcaagaccaattaaagatggttaaaattaacaaggatcccaaaaaaattccagagtggttggtagttaataaaatctatattcccgattttgtagtagaggatccaaaacaatctcagatatgggaaatttcaggagcagagtttacatcttccaagtcccataccgcaaatggaatatccattagatttcctagatttactaggataagagaggataaaacgtggaaagaatctactcatctaaacgatttagtaaacttgactaaatcttaatagttacatacaaactgaaaattaaaataacactatttagttggtggtcgccatggatggtgttattgtatactgtctaaacgcgctagtaaaacatggcgaggaaataaatcatataaaaaatgatttcatgattaaaccatgttgtgaaagagtttgtgaaaaagtcaagaacgttcacatcggcggacaatctaaaaacaatacagtgattgcagatttgccatatctggataatgcggtatccgatgtatgcaattcactgtataaaaagaatgtatcaagaatatccagatttgataaagatagatgacgatgacaagactcctactggtgtatataattattttaaacctaaagatgccattcctgttattatatccataggaaaggatagagatgtttgtgaactattaatctcatctgataaagcgtgtgcgtgtatagagttaaattcatataaagtagccattcttcccatggatgtttccttttttaccaaaggaaatgcatcattgattattctcctgtttgatttctctatcgatgcggcacctctcttaagaagtgtaaccgataataatgttattatatctagacaccagcgtctacatgacgagcttccgagttccaattggttcaagttttacataagtataaagtccgactattgttctatattatatatggttgttgatggatctgtgatgcatgcgatagctgataatagaactcacgcaattattagcaaaaatatattagacaatactacgattaacgatgagtgtagatgctgttattttgaaccacagattaggattcttgatagagatgagatgctcaatggatcatcgtgtgatatgaacagacattgtattatgatgtaggcaaatttggatctagtatgttggggaaatatgaacctgacatgattaagattgctctttcggtggctggtaatttaataagaaatcgagactacattcccgggagacgaggctatagcctctagataatttttttaagcacgaaataaaaaacataattttaaaccaatctatttcatactattttgtgtgatcaccatggacataaagatagatattagtatttctggtgataaatttacggtgactactaggagggaaaatgaagaaagaaaaaaatatctacctctccaaaaagaaaaaactactgatgttatcaaacctgattatcttgagtacgatgacttgttagatagagatgagatgtttactattctagaggaatattttatgtacagaggtctattaggcctcagaataaaatatggacgactctttaacgaaattaaaaaattcgacaatgatgcggaagaacaattcggtactatagaagaactcaagcagaaacttagattaaattctgaagagggagcagataactttatagattatataaaggtacaaaaacaggatatcgtcaaacttactgtatacgattgcatatctatgataggattgtgtgcatgcgtggtagatgtttggagaaatgagaaactgttttctagatggaaatattgtttacgagcgattaaactgtttattaatgatcacatgcttgataagataaaatctatactgcagaatagactagtatatgtggaaatgtcatagaaagttaaaagttaatgagagcaaaaatatataaggttgtattccatatttgttattttttctgtaatagttaaaaaatacattcgatggtctatctatcagattattatgtgttataaggtactttttctcataataaactagagtatgagtaagatagtgtttttcaaaacatataaatctaaaattgatggatgagatatacagctattaatttcgaaaatatattttaatctgataactttaaacatggatttttgatggtggtttaacgttttaaaaaaagattttgttattgtagtatatgataatattaaaagatggatataaagaatttgctgactgcatgtactattttttacattactacattggctacggcagatatacctacttcgtcactgccacacgctccggtaaacggggcatgtgacgagggagaatatcttgataagaggcataatcaatgttgtaatcagtgtccacctggagaatttgccaaggtcagatgtaatggtaacgataacacaaaatgtgaacgctgcccacctcatacatataccgcaatccccaattactctaatggatgtcatcaatgtagaaaatgcccaacaggatcatttgataaggtaaagtgtaccggaacacagaacagtaaatgttcgtgtcttcctggttggtattgcgctactgattcttcacagactgaagattgtcgagattgtataccaaaaaggagatgtccatgcggatactttggtggaatagatgaacaaggaaatcctatttgtaaatcgtgttgtgttggtgaatattgcgactacctacgtaattatagacttgatccatttcctccatgcaaactatctaaatgtaattaattatgattttgatgataatgttaccatacattatatcgctacttggttagtgtattattcagtatgaagacctattaataattacttatcttttgacgatcttgttataattataatataaaaacttatggcatagtaacttataattgctgacgcgataaattcgtaataatctgttttgttcaaaggaatctacaggcataaaaataaaaatataatttataatatactcttacagcgcgccatcatgaataacagcagtaaattaattgctgttattaatggatttagaaatagtggacgattttgtgatattaatatagttattaatgatgaaaggataaacgctcacagactcatcctatctggagcctccgaatatttttccattctgttttccaataattttatcgattctaatgaatacgaagttaatctaagtcatttagattatcaaagtgttaacgatttgatcgattacatttatgggatacctttgagcctaactaacgataacgtgaaatatattctttcaaccgctgattttttacaaattggatctgctattacggagtgtgaaaattacatacttaaaaatctttgttctagaaactgtatcgatttctacatatacgctgataaatataataacaagaaaatagaatcagcgtcgtttaacacaatattacaaaatattttgagactcatcaacgatgaaaactttaaatacttaacagaggaatcaatgataaaaattttaagcgatgatatgttaaatataaaaaatgaggatttcgccccactaattctcattaaatggttagagagtactcaacaaccatgcaccgtcgagttacttaaatgcctcagaatatcattgctttccccacaagttataaaatcactttatagtcatcgactggttagttcaatctacgaatgtataacattcttaaacaatatagcattcttggatgaatcatttcctagataccatagcatcgagttgatatctatcggtataagtaattcgcatgataagatttccataaactgctacaatcataaaaaaaatacatgggaaatgatatcttcacgtagatataggtgtagtttcgcagtggccgtcctggataatattatttatatgatgggtggatatgatcagtccccgtatagaagttcaaaggttatagcgtacaatacatgtacaaattcttggatatatgatataccagagctaaaatatcctcgttctaattgtgggggactggctgatgacgaatacatttattgtataggcggcatacgcgatcaggattcatcgttgacatctagtattgatagatggaagccatcaaaaccatattggcagaagtatgctaaaatgcgcgaaccaaaatgtgatatgggggttgcgatgttaaacggattaatatatgttataggtggaatcgttaaaggtgacacgtgtaccgacgcactagagagtttatcagaagatggatggatgaagcatcaacgtcttccaataaaaatgtccaatatgtcgacgattgttcatgatggcaagatttatatatctggaggttacaacaatagtagtgtagttaatgtaatatcgaatctagtccttagctataattcgatatatgatgaatggaccaaattatcatcattaaacattcctagaattaatcccgctctatggtcagcgcataataaattatatgtaggaggaggaatatctgatgatgttcgaactaatacatctgagacatacgacaaagaaaaagattgttggacattggataatggtcacgtgttaccacgcaattatataatgtataaatgcgaaccgattaaacataaatatccattggaaaaaacacagtacacgaatgattttctaaagtatttggaaagttttataggtagttgatagaacaaaatacataattttgtaaaaataaatcactttttatactaatatgacacgattaccaatacttttgttactaatatcattagtatactctacaccttttcctcagacatctaaaaaaataggtgatgatgcaactctatcatgtaatcgaaataatacaaatgactacgttgttatgagtgcttggtataaggagcccaattccattattcttttagctgctaaaagcgacgtcttgtattttgataattataccaaggataaaatatcttacgactctccatacgatgatctagttacaactatcacaattaaatcattgactgctagagatgccggtacttatgtatgtgcattctttatgacatcgcctacaaatgacactgataaagtagattatgaagaatactccacagagttgattgtaaatacagatagtgaatcgactatagacataatactatctggatctacacattcaccggaaactagttctgagaaacctgattatatagataattctaattgctcgtcggtattcgaaatcgcgactccggaaccaattactgataatgtagaagatcatacagacaccgtcacatacactagtgatagcattaatacagtaagtgcatcatctggagaatccacaacagacgagactccggaaccaattactgataaagaagaagatcatacagtcacagacactgtctcatacactacagtaagtacatcatctggaattgtcactactaaatcaaccaccgatgatacgtacaatgataatgatacagtaccatcaactactgtaggcggtagtacaacctctattagcaattataaaaccaaggactttgtagaaatatttggtattaccgcattaattatattgtcggccgtggcaatattctgtattacgtattatatatgtaataaacgttcacgtaaatacaaaacagagaacaaagtctagatttttgacttacataaatgtctgggatagtaaaatctatcatattgagcggaccatctggtttaggaaagacagccatagccaaaagactatgggaatatatttggatttgtggtgtcccataccactagatttcctcgtcctatggaacgagaaggtgtcgattaccattacgttaacagagaggccatctggaagggaatagccgccggaaactttctagaacatactgagtttttaggaaatatttacggaacttctaaaactgctgtgaatacagcggctattaataatcgtatttgtgtgatggatctaaacatcgatggcgttagaagtcttaaaaatacgtacctaatgccttactcggtgtatataagacctacctctcttaaaatggttgagaccaagcttcgttgtagaaacactgaagcggatgatgagattcatcgtcgtgtgatgttggcaaaaactgacatggatgaggcaggtgaagccggtctattcgacactattattattgaagatgatgtgaatttagcatatagtaagttaattcagatactacaggaccgtattagaatgtattttaacactaattagagacttaagacttaaaacttgataattaataatataactcgtttttatatgtggctatttcaacgtctaatgtattagttaaatattaaaacttaccacgtaaaacttaaaatttaaaatggtatttcattgacagatagatcacacattatgaactttcaaggacttgtgttaactgacaattgcaaaaatcaatgggtcgttggaccattaataggaaaaggtggattcggtagtatttatactactaatgacaataattatgtagtaaaaatagagcccaaagctaacggatcattatttaccgaacaggcattttatactagagtacttaaaccatccgttatcgaagaatggaaaaaatctcacaatataaagcacgtaggtcttatcacgtgcaaggcatttggtctatacaaatccattaatgtggaatatcgattcttggtaattaatagattaggtgcagatctagatgcggtgatcagagccaataataatagattaccaaaaaggtcggtgatgttgatcggaatcgaaatcttaaataccatacaatttatgcacgagcaaggatattctcacggagatattaaagcgagtaatatagtcttggatcaaatagataagaataaattatatctagtggattacggattggtttctaaattcatgtctaacggcgaacatgttccatttataagaaatccaaataaaatggataacggtactctagaatttacacctatagattcgcataaaggatacgttgtatctagacgtggagatctagaaacacttggatattgtatgattagatggttgggaggtatcttgccatggactaagatatctgaaacaaagaattgtgcattagtaagtgccacaaaacagaaatatgttaacaatactgcgactttgttaatgaccagtttgcaatatgaacctagagaattgctgcaatatattaccatggtaaactctttgacatattttgaggaacccaattacgacaagtttcggcacatattaatgcagggtgtatattattaagtgtggtgtttggtcgataaaaattaaaaaataacttaatttattattgatctcgtgtgtacaaccgaaatcatggcgatgttttacgcacacgctctcggtgggtacgacgagaatcttcatgcctttcctggaatatcatcgactgttgccaatgatgtcagaaaatattctgttgtgttagtttataataacaagtatgacattgtaaaagacaaatatatgtggtgttacagtcaggtgaacaagagatatattggagcactgctgcctatgtttgagtgcaatgaatatctacaaattggagatccgatccatgatcaagaaggaaatcaaatctctatcatcacatatcgccacaaaaactactatgctctaagcggaatcgggtacgagagtctagacttgtgtttggaaggagtagggattcatcatcacgtacttgaaacaggaaacgctgtatatggaaaagttcaacatgattattctactatcaaagagaaggccaaagaaatgaatgcacttagtccaggacctatcatcgattaccacgtctggataggagattgtatctgtcaagttactgctgtggacgtacatggaaaggaaattatgagaatgagattcaaaaagggtgcggtgcttccgatcccaaatctggtaaaagttaaacttggggagaatgatacagaaaatctttcttctactatatcggcggcaccatcgaggtaaccacctctctggaagacagcgtgaataatgtactcatgaaacgtttggaaactatacgccatatgtggtctgttgtatatgatcattttgatattgtgaatggtaaagaatgctgttatgtgcatacgcattcatctaatcaaaatcctataccgagtactgtaaaaacaaatttgtacatgaagactatgggatcatgcattcaaatggattccatggaagctctagagtatcttagcgaactgaaggaatcaggtggatggagtcccagaccagaaatgcaggaatttgaatatccagatggagtggaagacactgaatcaattgagagattggtagaggagttcttcaatagatcagaacttcaggctggtgaatcagtcaaatttggtaattctattaattgttaaacatacatctgtttcagctaagcaactaagaacacgtatacggcagcagcttccttctatactctcatcttttaccaacacaaagggtggatatttgttcattggagttgataataatacacacaaagtatttggattcacggtgggttacgactacctcagactgatagagaatgatatagaaaagcatatcaaaagactttgtgttgtgtatttctgtgagaagaaagaggacatcaagtacgcgtgtcgattcatcaaggtatataaacctggggatgaggctacctcgacatacgtgtgcgctatcaaagtggaaagatgctgttgtgctgtgtttgcagattggccagaatcatggtatatggatactaatggtatcaagaagtattctccagatgaatgggtgtcacatataaaattttaattaatgtaactatagagaacaaataataaggttgtaatatcatatagacaataactaacaattaattagtaactgttatctcttttttaattaaccaactaactatatacctattaatacatcgtaattatagttcttaacatctattaatcattaattcgcttctttaattttttataaactaacattgttaattgaaaagggataacatgttacagaatataaattatatatggatttttttaaaaaggaaatacttgactggagtatatatttatctcttcattatatagcacgcgtgttttccaatttttccacatcccatataatacaggattataatctcgttcgaacatacgagaaagtggataaaacaatagttgattttttatctaggttgccaaatttattccatattttagaatatggggaaaatattctacatatttattctatggatgatgctaatacgaatattataattttttttctagatagagtattaaatattaataagaacgggtcatttatacacaatctcgggttatcatcatccattaatataaaagaatatgtatatcaattagttaataatgatcatccagataataggataagactaatgcttgaaaatggacgtagaacaagacattttttgtcctatatatcagatacagttaatatctatatatgtattttaataaatcatggattttatatagatgccgaagacagttacggttgtacattattacatagatgtatatatcactataagaaatcagaatcagaatcatacaatgaattaattaagatattgttaaataatggatccgatgtagataaaaaagatacgtacggaaacacaccttttatcctattatgtaaacacgatatcaacaacgtggaattgtttgagatatgtttagagaatgctaatatagactctgtagactttaatagatatacacctcttcattatgtctcatgtcgtaataaatatgattttgtaaagttattaatttctaaaggagcaaatgttaatgcgcgtaataaattcggaactactccattttattgtggaattatacacggtatctcgcttataaaactatatttggaatcagacacagagttagaaatagataatgaacatatagttcgtcatttaataatttttgatgctgttgaatctttagattatctattatccagaggagttattgatattaactatcgtactatatacaacgaaacatctatttacgacgctgtcagttataatgcgtataatacgttggtctatctattaaacaaaaatggtgattttgagacgattactactagtggatgtacatgtatttcggaagcagtcgcaaacaacaacaaaataataatggaagtactattgtctaaacgaccatctttgaaaattatgatacagtctatgatagcaattactaaacataaacagcataatgcagatttattgaaaatgtgtataaaatatactgcgtgtatgaccgattatgatactcttatagatgtacagtcgctacagcaatataaatggtatattttaagatgtttcgatgaaatagatatcatgaagagatgttatataaaaaataaaactgtattccaattagttttttgtatcaaagacattaatactttaatgagatacggtaaacatccttctttcgtgaaatgcactagtctcgacgtatacggaagtcgtgtacgtaatatcatagcatctattagatatcgtcagagattaattagtctattatccaagaagctggatcctggagataaatggtcgtgttttcctaacgaaataaaatataaaatattggaaaactttaacgataacgaactatccacatatctaaaaatcttataaacattattaaaatataaaatctaagtaggataaaatcacactacatcattgtttccttttagtgctcgacagtgtatactatttttaacgctcataaataaaaatgaaaacgatttccgttgttacgttgttatgcgtactacctgctgttgtttattcaacatgtactgtacccactatgaataacgctaaattaacgtctaccgaaacatcgtttaatgataaccagaaagttacgtttacatgtgatcagggatatcattctttggatccaaatgctgtctgtgaaacagataaatggaaatacgaaaatccatgcaaaaaaatgtgcacagtttctgattatgtctctgaactatataataaaccgctatacgaagtgaattccaccatgacactaagttgcaacggcgaaacaaaatattttcgttgcgaagaaaaaaatggaaatacttcttggaatgatactgttacgtgtcctaatgcggaatgtcaacctcttcaattagaacacggatcgtgtcaaccagttaaagaaaaatactcatttggggaatatatgactatcaactgtgatgttggatatgaggttattggtgcttcgtacataagttgtacagctaattcttggaatgttattccatcatgtcaacaaaaatgtgatatgccgtctctatctaacggattaatttccggatctacattttctatcggtggcgttatacatcttagttgtaaaagtggttttacactaacggggtctccatcatccacatgtatcgacggtaaatggaatcccatactcccaatatgtgtacgaactaacgaaaaatttgatccagtggatgatggtcccgacgatgagacagatttgagcaaactctcgaaagacgttgtacaatatgaacaagaaatagaatcgttagaagcaacttatcatataatcatagtggcgttgacaattatgggcgtcatatttttaatctccgttatagtattagtttgttcctgtgacaaaaataatgaccaatataagttccataaattgctaccgtaaatataaatccgttaaaataattaataatttaataacaaacaagtatcaaaagattaaagacttatagctagaatcaattgagatgtcttcttcagtggatgttgatatctacgatgccgttagagcatttttactcaggcactattataacaagagatttattgtgtatggaagaagtaacgccatattacataatatatacaggctatttacaagatgcgccgttataccgttcgatgatatagtacgtactatgccaaatgaatcacgtgttaaacaatgggtgatggatacacttaatggtataatgatgaatgaacgcgatgtttctgtaagcgttggcaccggaatactattcatggaaatgtttttcgattacaataaaaatagtatcaacaatcaactaatgtatgatataattaatagcgtatctataattctagctaatgagagatatagaagcgcttttaacgacgatggtatatacatccgtagaaatatgattaacaagttgtacggatacgcatctctaactactattggcacgatcgctggaggtgtttgttattatctgttgatgcatctagttagtttgtataaataattatttcaatatactagttaaaattttaagattttaaatgtataaaaaactaataacgtttttatttgtaataggtgcattagcatcctattcgaataatgagtacactccgtttaataaactgagtgtaaaactctatatagatggagtagataatatagaaaattcatatactgatgataataatgaattggtgttaaattttaaagagtacacaatttctattattacagagtcatgcgacgtcggatttgattccatagatatagatgttataaacgactataaaattattgatatgtataccattgactcgtctactattcaacgcagaggtcacacgtgtagaatatctaccaaattatcatgccattatgataagtacccttatattcacaaatatgatggtgatgagcgacaatattctattactgcagagggaaaatgctataaaggaataaaatatgaaataagtatgatcaacgatgatactctattgagaaaacatactcttaaaattggatctacttatatatttgatcgtcatggacatagtaatacatattattcaaaatatgatttttaaaaatttaaaatatattatcacttcagtgacagtagtcaaataacaaacaacaccatgagatatattataattctcgcagttttgttcattaatagtatacatgctaaaataactagttataagtttgaatccgtcaattttgattccaaaattgaatggactggggatggtctatacaatatatcccttaaaaattatggcatcaagacgtggcaaacaatgtatacaaatgtaccagaaggaacatacgacatatccgcatttccaaagaatgatttcgtatctttctgggttaaatttgaacaaggcgattataaagtggaagagtattgtacgggactatgcgtcgaagtaaaaattggaccaccgactgtaacattgactgaatacgacgaccatatcaatttgtacatcgagcatccgtatgctactagaggtagcaaaaagattcctatttacaaacgcggtgacatgtgtgatatctacttgttgtatacggctaacttcacattcggagattctaaagaaccagtaccatatgatatcgatgactacgattgcacgtctacaggttgcagcatagactttgtcacaacagaaaaagtgtgcgtgacagcacagggagccacagaagggtttctcgaaaaaattactccatggagttcgaaagtatgtctgacacctaaaaagagtgtatatacatgcgcaattagatccaaagaagatgttcccaatttcaaggacaaaatggccagagttatcaagagaaaatttaatacacagtctcaatcttatttaactaaatttctcggtagcacatcaaatgatgttaccacttttcttagcatgcttaacttgactaaatattcataactaatttttattaatgatacaaaaacgaaataaaactgcatattatacactggttaacgcccttataggctctaaccattttcaagatgaggtccctgattatagtccttctgttcccctctatcatctactccatgtctattagacgatgtgagaagactgaagaggaaacatggggattgaaaatagggttgtgtataattgccaaagatttctatcccgaaagaactgattgcagtgttcatctcccaactgcaagtgaaggattgataactgaaggcaatggattcagggatatacgaaacaccgataaattataaaaaaagcaatgtgtccgctgtttccgttaataatactattttcgtaactggcggattattcataaataactctaatagcacgatcgtggttaacaatatggaaaaacttgacatttataaagacaaacaatggtcgattatagaaatgcctatggctagggtatatcacggcattgactcgacatttggaatgttatattttgccggaggtctatccgttaccgaacaatatggtaatttagagaaaaacaacgagatatcttgttacaatcctagaacgaataagtggtttgatatttcatatactatttataagatatccatatcatcattgtgtaaactaaataacgtcttctatgtatttagtaaggacattggatatgtggaaaagtatgatggtgcatggaagttagtacatgatcgtctccccgctataaaggcattatcaacttctccttattgattgaaaatgaaaatataaatagtttttatgtatagcagtattaccctatagttttattgcttactactaacatggatacagatgttacaaatgtagaagatatcataaatgaaatagatagagagaaagaagaaatactaaaaaatgtagaaattgaaaataataaaaacattaacaagaatcatcccaatgaatatattagagaagcactcgttattaataccagtagtaatagtgattccattgataaagaagttatagaatgtatcagtcacgatgtaggaatatagatcatatctactaatttttataatcgatacaaaacataaaaaacaactcgttattacatagcaggcatggaatccttcaagtattgttttgataacgatggcaagaaatggattatcggaaatactttatattctggtaattcaatactatataaggtcagaaaaaatttcactagttcgttctacaattacgtaatgaagatagatcacaaatcacacaagccattgttgtctgaaatacgattctatatatctgtattggatcctttgactatcgacaactggacacgggaacgtggtataaagtatttggctattccagatctgtatggaattggagaaaccgatgattatatgttcttcgttataaagaattcgggaagagtattcgccccaaaggatactgaatcagtcttcgaagcatgcgtcactatgataaacacgttagagtttatacactctcaaggatttacccatggaaaaatagaaccgaggaatatactgattagaaataaacgtctttcactaattgactattctagaactaacaaactatacaagagtggaaactcacatatagattacaacgaggacatgataacttcaggaaatatcaattatatgtgtgtagacaatcatcttggagcaacagtttcaagacgaggagatttagaaatgttgggatattgcatgatagaatggttcggtggcaaacttccatggaaaaacgaaagtagtataaaagtaataaaacaaaaaaaagaatataaaaaatttatagctactttctttgaggactgttttcctgaaggaaatgaacctctggaattagttagatatatagaattagtatacacgttagattattctcaaactcctaattatgacagactacgtaaactgtttatacaagattgaaattatattcttttttttatagagtgtggtagtgttacggatatctaatattaatattagactatctctatcgcgctacacgaccaatatcgattactatggatatcttctatgaaaggagagaatgtatttatttctccagcgtcaatctcgtcagtattgacaatactgtattatggagctaatggatccactgctgaacagctatcaaaatatgtagaaacggaggagaacacggataaggttagcgctcagaatatctcattcaaatccatgaataaagtatatgggcgatattctgccgtgtttaaagattcctttttgagaaaaattggcgataagtttcaaactgttgacttcactgattgtcgcactatagatgcaatcaacaagtgtgtagatatctttactgaggggaaaatcaatccactattggatgaaccattgtctcctagcaattagtgccgtatactttaaagcaaaatggttgacgccattcgaaaaggaatttaccagtgattatcccttttacgtatctccgacggaaatggtagacgtaagtatgatgtctatgtacggcaaggcatttaatcacgcatctgtaaaagaatcattcggcaacttttcaatcatagaactgccatatgttggagatactagtatgatggtcattcttccagacaagattgatggattagaatccatagaacaaaatctaacagatacaaattttaagaaatggtgtgactttatggatgctatgtttatagatgttcacattcccaagtttaaggtaacaggctcgtataatctggtggatactctagtaaagtcaggactgacagaggtgttcggttcaactggagattatagcaatatgtgtaatttagatgtgagtgtcgacgctatgatccacaaaacgtatatagatgtcaatgaagagtatacagaagcagctgcagcaacttctgtactagtggcagactgtgcatcaacaattacaaatgagttctgtgcagatcatccgttcatctatgtgattaggcatgttgatggaaaaattcttttcgttggtagatattgctctccgacaactaattgttaaccattttttttaaaaaaaatagaaaaaacatgtggtattagtgcaggtcgttgttcttccaattgcaattggtaagatgacggccaactttagtacccacgtcttttcaccacagcactgtggatgtgacagactgaccagtattgatgacgtcaaacaatgtttgactgaatatatttattggtcgtcctatgcataccgcaacaggcaatgcgctggacaattgtattccacactcctctcttttagagatgatgcggaattagtgttcatcgacattcgcgagctggtaaaaaatatgccgtgggatgatgtcaaagattgtacagaaatcatccgttgttatataccggatgagcaaaaaaccatcagagagatttcggccatcatcggactttgtgcatatgctgctacttactggggaggtgaagaccatcccactagtaacagtctgaacgcattgtttgtgatgcttgagatgctaaattacgtggattataacatcatattccggcgtatgaattgatgagttgtacatcttgacattttctttcttctcttctccctttcttctcttctcccttcctccctcttctccctttcccagaaacaaacttttttacccactataaaataaaatgagtatactacctgttatatttctttctatatttttttattcttcattcgttcagacttttaacgcgcctgaatgtatcgacaaagggcaatattttgcatcattcatggagttagaaaacgagccagtaatcttaccatgtcctcaaataaatacgctatcatccggatataatatattagatattttatgggaaaaacgaggagcggataatgatagaattataccgatagataatggtagcaatatgctaattctgaacccgacacaatcagactctggtatttatatatgcattaccacgaacgaaacctactgtgacatgatgtcgttaaatttgacaatcgtgtctgtctcagaatcaaatatagattttatctcgtatccacaaatagtaaatgagagatctactggcgaaatggtatgtcccaatattaatgcatttattgctagtaacgtaaacgcagatattatatggagcggacatcgacgccttagaaataagagacttaaacaacggacacctggaattattaccatagaagatgttagaaaaaatgatgctggttattatacatgtgttttagaatatatatacggtggcaaaacatataacgtaaccagaattgtaaaattagaggtacgggataaaataataccttctactatgcaattaccagatggcattgtaacttcaataggtagtaatttgactattgcatcgttgagacctcccacaacggatgcagacgtcttttggataagtaatggtatgtattacgaagaagatgatggggacggaaacggtagaataagtgtagcaaataaaatctatatgaccgataagagacgtgttattacatcccggttaaacattaatcctgtcaaggaagaagatgctacaacgtttacgtgtatggcgtttactattcctagcatcagcaaaacagttactgttagtataacgtgaatgtatgttgttacatttccatgtcaattgagtttataagaatttttatacattatcttccaacaaacaattgacgaacgtattgctatgattaactcccacgatactatgcatattattaatcattaacttgcagactatacctagtgctattttgacatactcatgttcttgtgtaattgcggtatctatattattaaagtacgtaaatctagctatagttttattatttaattttagataatataccgtctccttatttttaaaaattgccacatcctttattaaatcatgaatgggaatttctatgtcatcgttagtatattgtgaacaacaagagcagatatctataggaaagggtggaatgcgatacattgatctatgtagttttaaaacacacgcgaactttgaagaatttatataaatcattccatcgatacatccttctatgttgagatgtatatatccaggaattcgtttattaatatcgggaaatgtataaactaaaacattgcccgaaagcggtgcctctatctgcgttatatccgttcttaacttacaaaatgtaaccaatacctttgcatgacttgttttgttcggcaacgttagtttaaacttgacgaatggattaattacaatagcatgatccgcgcatctattaagtttttttactttaacgcccttgtatgtttttacagagactttatctaaatttctagtgcttgtatgtgttataaatataacgggatatagaaccgaatcacctaccttagatacccaattacattttatcagatccagataataaacaaattttgtcgccctaactaattctatattgttatatattttacaattggttatgatatcatgtaataacttggagtctaacgcgcatcgtcgtacgtttatacaattgtgatttagtgtagtatatctacacatgtatttttccgcactatagtattctggactagtgataaaactatcgttatatctatcttcaatgaactcatcgagatattgctctctgtcatattcatacacctgcataaactttctagacatcttacaatccgtgttattttaggatcatatttacatatttacgggtatatcaaagatgttagattagttaatgggaatcgtctataataatgaatattaaacaattatatgaggacttttaccacaaagcatcataaaaatgagtcgtcgtctgatttatgttttaaatatcaaccgcaaatcaactcataaaatacaagagaatgaaatatatacatattttagtcattgcaatatagaccatacttctacagaacttgattttgtagttaaaaactatgatctaaacagacgacaacctgtaactgggtatactgcactacactgctatttgtataataattactttacaaacgatgtactgaagatattattaaatcatggagtggatgtaacgatgaaaaccagtagcggacgtatgcctgtttatatattgcttactagatgttgtaatatttcacatgatgtagtgatagatatgatagacaaagataaaaaccacttattacatagagactattccaacctattactagagtatataaaatctcgttacatgttattaaaggaagaggatatcgatgagaacatagtatccactttattagataagggaatcgatcctaactttaaacaagacggatatacagcgttacattattattatttgtgtctcgcacacgtttataaaccaggtgagtgtagaaaaccgataacgataaaaaaggccaagcgaattatttctttgtttatacaacatggagctaatctaaacgcgttagataattgtggtaatacaccattccatttgtatcttagtattgaaatgtgtaataatattcatatgactaaaatgctgttgacttttaatccgaatttcgaaatatgtaataatcatggattaacgcctatactatgttatataacttccgactacatacaacacgatattcttgttatgttaatacatcactatgaaacaaatgttggagaaatgccgatagatgagcgtcgtatgatcgtattcgagtttatcaaaacatattctacacgtccggcagattcgataacttatttgatgaataggtttaaaaatataaatatttatacccgctatgaaggaaagacattattacacgtagcatgtgaatataataatacacacgtaatagattatcttatacgtatcaacggagatataaatgcgttaaccgacaataacaaacacgctacacaactcattatagataacaaagaaaattccccatataccattaattgtttactgtatatacttagatatattgtagataagaatgtgataagatcgttggtggatcaacttccatctctacctatcttcgatataaaatcatttgagaaattcatatcctactgtatacttttagatgacacattttacgataggcacgttaagaatcgcgattctaaaacgtatcgatacgcattttcaaaatacatgtcgtttgataaatacgatggtataataactaaatgtcacgacgaaacaatgttactcaaactgtccactgttctagacactacactatatgcagttttaagatgtcataattcgagaaagttaagaagatacctcaacgagttaaaaaaatataataacgataagtcctttaaaatatattctaatattatgaatgagagataccttaatgtatattataaagatatgtacgtgtcaaaggtatatgataaactatttcctgttttcacagataaaaattgtctactaacattactaccttcagaaattatatacgaaatattatacatgctgacaattaacgatctttataatatatcgtatccacctaccaaagtatagttgtatttttctcatgcgatgtgtgtaaaaaaactgatattatataaatattttagtgccgtataataaagatgacgatgaaaatgatggtacatatatatttcgtatcattattgttattgctattccacagttacgccatagacatcgaaaatgaaatcacagaattcttcaataaaatgagagatactctaccagctaaagactctaaatggttgaatccagcatgtatgttcggaggcacaatgaatgatatagccgctctaggagagccattcagcgcaaagtgtcctcctattgaagacagtcttttatcgcacagatataaagactatgtggttaaatgggagaggctagaaaagaatagacggcgacaggtttctaataaacgtgttaaacatggtgatttatggatagccaactatacatctaaattcagtaaccgtaggtatttgtgcaccgtaactacaaagaatggtgactgtgttcagggtatagttagatctcatattaaaaaacctccttcatgcattccaaaaacatatgaactaggtactcatgataagtatggcatagacttatactgtggaattctttacgcaaaacattataataatataacttggtataaagataataaggaaattaatatcgacgacattaagtattcacaaacgggaaaggaattaattattcataatccagagttagaagatagcggaagatacgactgttacgttcattacgacgacgttagaatcaagaatgatatcgtagtatcaagatgtaaaatacttacggttataccgtcacaagaccacaggtttaaactaatactagatccgaaaatcaacgtaacgataggagaacctgccaatataacatgcactgctgtgtcaacgtcattattgatcgacgatgtactgattgaatgggaaaatccatccggatggcttataggattcgattttgatgtatactctgttttaactagtagaggcggtatcaccgaggcgaccttgtactttgaaaatgttactgaagaatatataggtaatacatataaatgtcgtggacacaactattattttgaaaaaacccttacaactacagtagtattggagtaaatacacaatgcatttttatatacattactgaattattattactgaattattattactgaattattattaattatatcgtatttgtgctatagaatggatgaagatacgcgactatctaggtatttgtatctcaccgatagagaacatataaatgtagactctattaaacagttgtgtaaaatatcagatcctaatgcatgttatagatgtggatgtacggctttacatgagtacttttataattatagatcagtcaacggaaaatacaagtatagatacaacggttactatcaatattattcatctagcgattatgaaaattataatgaatattattatgatagaactggtatgaacagtgagagtgataatatatcaatcaaaacagaatatgaattctatgatgaaacacaagatcaaagtacacaactagtaggttacgacattaaactcaaaaccaatgaggatgattttatggctatgatagatcagtgggtgtccatgattatatagatgaatcaattaataaagtagtatatggaagagagtctcacgtaagatggcgggatatatggcaagaacataatgatggcgtatacagtataggaaaggagtgcatagataatatatacgaagacaaccataccgtagacgaattctacaagatagacagcgtatcagatgtagatgacgcggaacacatatctcctataactaatgatgtatctacacaaacatgggaaaagaaatcagagttagatagatacatggaatcgtatcctcgtcatagatatagtaaacattctgtatttaagggattttctgataaagttagaaaaaatgatttagacatgaatgtggtaaaagaattactttctaacggtgcatctctaacaatcaaggatagcagtaataaggatccaattgctgtttattttagaagaacgataatgaatttagaaatgattgatattattaacaaacatacaactattgatgaacgaaagtatatagtacactcctatctaaaaaattatagaaatttcgattatccatttttcaggaagttagttttgactaataaacattgtctcaacaattattataatataagcgacagcaaatatggaacaccgctacatatattggcgtctaataaaaaattaataactcctaattacatgaagttattagtgtataacggaaatgatataaacgcacgaggtgaagatacacaaatgcgaaccaactcagaaatggttgttgtattattgggtgtataggtattattagctatgtaccaatttaccaaccctcttaatattgattgataatcacatcggttatccaatcaataactaaattgtagtgtatatatagaccatatatgtttctatttttttgacagttacgtatagtttcagtaagttttgattgttgtattcctgtatctctagataagttagtcatatagtcccttccggcgatacgttttttccaagcccgaaattgattagccaaatgtgtatttatttttgtgatattgatataatatttcggataatgcatactgttagtcttatatcatttggttcatctatgtattgtaatattgttacatgatctatagatgatgtattgattttggcaggatcgaattccatatccgcgactaaacagtgaaaaaaatgtaaatactttttaaattttaaattagtaaaacttttttttattttttatgattccaaaaatactgaatacaaagtcctaaattataaatatggagatcatactaccacaacttattattatgtatacaaggccggtgtaatagatagatatatataattctattacaccggcagacaattaccgaccggtatttgtcgttaccaacataccgtataatatgtaatatacaattccataacccattgacagttgttatacatcaaaattgcaattcttttgattacgatgttataagaatgtagttaattgatgtatgatgttaatgtgtcctctttcctcttataacatcgtaatcaaaaacttttttataatatatacctaataatgtgtcttaatagttctcgtgattcgtcaaacaatcattcttataaaatataataaagcaacgtaaaacacataaaaataagcgtaactaataagacaatggatatttacgacgataaaggtctacagactattaaactgtttaataatgaatttgattgtataaggaatgacatcagagaattatttaaacatgtaactgattccgatagtatacaacttccgatggaagacaattctgatattatagaaaatatcagaaaaatactatatagacgattaaaaaatgtagaatgtgttgacatcgataacacaataacttttatgaaatacgatccaaatgatgataataagcgtacgtgttctaattgggtacccttaactaataactatatggaatattgtctagtaatatatttggaaacaccgatatgtggaggcaaaataaaattataccaccctacaggaaatataaagtcggataaggatattatgtttgcaaagactctagactttaaatcaacgaaagtgttaactggacgtaaaacaattgccgttctagacatatccgtttcatataatagatcaatgactactattcactacaacgacgacgttgatatagatatacatactgataaaaatggaaaagagttatgttattgttatataacaatagatgatcattacttggttgatgtggaaactataggagttatagtcaatagatctggaaaatgtctgttagtaaataaccatctaggtataggtatcgttaaagataaacgtataagcgatagttttggagatgtatgtatggatacaatatttgacttttctgaagcacgagagttattttcattaactaatgatgataacaggaatatagcatgggacactgataaactagacgatgatacagatatatggactcccgtcacagaagatgattacaaatttctttctagactagtattgtatgcaaaatctcaatcggatactgtatttgactattatgttcttactggtgatacggaaccacccactgtattcattttcaaggtaactagattttactttaatatgccgaaataaaaaatttttgtataatatctagaggtagaggtattgtttagataaatacaaataacatagatacatcgcatacttagcatttttataaatatacataagacatacactttatacatttttgtaaaaatactcataaaaaaaatttataaaaattatggcacaaccatatcttgtataggtagtttagttcgtcgagtgaacctataaacagataatagacaacacataataatgcctactaatacaagcataataccgggagatgggatatatgacgttgtagtgtttgggttttctgaacgttgatagtctactaatactacatgctgacatctaatgcctgtataaccatgagagcatctacaatacataccgtcaatatctctagcgtggatacagtcaccgtgtaaacaatatccatctccctctggaccgcataatctgatagctggaatatctgttgtagcgtttgtaatttctggcaatgtcgtttcgatagcgttaccactatcggcgaatgatctgattatcatagcagcgaacaacaacatcagataatttatcaacatttttgatggattctgtgtttatgctgtttctcagtgtgtgtttatgacaagattgggaattttatattattaattcagtaatataaactaataatatattgttaattgtgtaaataatataaaaataacaatacaatattgaatgtgttgctgttaaaaatgtatgtgttaatataatagaataaaataaatgagtatgatcattttagataacgattgattttatcattaccgcttcattcttatattctttgcttacggaacctatatttagaaacatctactaacaattttttatgcttgcattattaatggtatgtaatatgattgattgtgtacgcaataccaatttgttaagtatgaatacggggtacaaacataaattgaaatttaacattatttatttatgatatatatcgttatcgttaggtctataccatggatatctttaaagaactaatcttaaaacaccctgatgaaaatgttttgatttctccagtttccattttatctactttatctattctaaatcatggagcagctggttctacagctgaacaactatcaaaatatatagagaatatgaatgagaatacacccgatgacaataatgatgacatggaggtagatattccgtattgtgcgacactagctaccgcaaataaaatatacggtagcgatagtatcgagttccacgcctccttcctacaaaaaataaaagacgattttcaaactgtaaactttaataatgctaaccaaacaaaggaactaatcaacgaatgggttaagacaatgacaaatggtaaaattaattccttattgactagtccgctatccattaatactcgtatgacagttgttagcgccgtccattttaaagcaatgtggaaatatccattttctaaacatcttacatatacagacaagttttatatttctaagaatatagttaccagcgttgatatgatggtgggtaccgagaataacttgcaatatgtacatattaatgaattattcggaggattctctattatcgatattccatacgagggaaactctagtatggtaattatactaccggacgacatagaaggtatatataacatagaaaaaaatataacagatgaaaaatttaaaaaatggtgtggtatgttatctactaaaagtatagacttgtatatgccaaagtttaaagtggaaatgacagaaccgtataatctggtaccgattttagaaaatttaggacttactaatatattcggatattatgcagattttagcaagatgtgtaatgaaactatcactgtagaaaaatttctacatacgacgtttatagatgttaatgaggagtatacagaagcatcggccgttacaggagtatttacgattaacttttcgatggtatatcgtacgaaggtctacataaaccatccattcatgtacatgattaaagacaccacaggacgtatactttttatagggaaatactgctatccgcaataaatataaacaaatagacttttataaagagtcttcaacgataagtatatcgacatactacttatgctgcgaaagattctgaacgagaacgactatctcaccctcttggatcatatccgcactgctaaatactaaatctccactacactttttatcatcttatgaggaatgattgccttcgtgaaataggaataattagcaccagaatagctatggattattgtggtagagagtgcactattctatgtcgtctactggatgaagatgtgacgtacaaaaaaataaaactagaaattgaaacgtgtcacaacttatcaaaacatatagatagacgaggaaacaatgcgctacattgttacgtctccaataaatgcgatacagacattaagattgttctctcgcggagtcgagagactttgtagaaacaacgaaggattaactccgctaggagtatacagtaagcatagatacgtcaaatctcagattgtgcatctactgatatccagctattcaaattcctctaacgaactcaagtcgaatataaatgatttcgatctgtattcggataatatcgacttacgtctgctaaaatacctaattgtggataaacggatacgtccgtccaagaatacgaattatgcaatcaatggtctcggattggtggatatatacgtaacgacgcctaatccgagaccagaagtattgctatggcttcttaaatcagaatgttacagcaccggttacgtatttcgtacctgtatgtacgacagtgatatgtgtaagaactctcttcattactatatatcgtctcatagagaatctcaatctctatccaaggatgtaattaaatgtttgatcgataacaatgtttccatccatggcagagacgaaggaggatctttacccatccaatactactggtctttctcaaccatagatatagagattgttaaattattattaataaaggatgtggacacgtgtagagtatacgacgtcagccctatattatctaaacaagcgatttagagtaaccccatataatgtagacatggaaatcgttaatcttcttattgagagacgtcatactcttgtcgacgtaatgcgtagtattacttcgtacgattccagagaatataaccactacatcatcgataacattctaaagagatttagacaacaggatgtacaagccatgttgataaactacttacattacggcgatatggtcgttcgatgcatgttagataacggacaacaactatcctctgcacgactactttgttaataataatctcgtcgatgtaaacgtcgtaaggtttatcgtggaaaatatggacacgcggctgtaaatcacgtatcgaacaatggccgtctatgtatgtacggtctgatattatcgagatttaataattgcgggtatcactgttatgaaaccatactgatagatgtatttgatatactaagcaagtacatggatgatatagatatgatcgataactctactatattacgcggtcgatgtcaataatatacaatttgcaaagcggttattggaatatggagcgagtgtcacgctcgataatcaatacggccatccagaaaagcagttaccaaagagaaaacaaaacgaagctagttgatttattactgagttaccatcccactctagagactatgattgacgcatttaatagagatatacgctatctatatcctgaaccattattcgcctgtatcagatacgccttaatcctagatgatgattttccttctaaagtaaagtatgatatcgccggtcgtcataaggaactaaagcgctatagagtagacattaatagaatgaagaatgtctacatatcaggcgtctccatgtttgatatattatttaaacgaagcaaacgccacaaattgagatacgcaaagaatccgacatcaaatggtacaaaaaagaactaacgtccatcattacagaaactgtaaagaacaatgagaggatcgactccatagtggacaacattaatacagacgataacttgatttcgaaattacccatggagatactttattactccattaaataatttatcatggagcgataatgtcctgtttcatttgtttccatgacatattacaaaatcgattccgtccaagatgataaaaacatttaccggcatcataaacacggagtttattttatatgtctcgcataaacattactaaaaaaatatattgttcggttttctttcacatctttaattatgaaaaagtaaatcattatgagatggacgagattgtacgcatcgttcgcgacagtatgtggtacatacctaacgtatttatggacgacggtaagaatgaaggtcacgtttctgtcaacaatgtctgtcatatgtattttacgttctttgatgtggatacatcgtctcatctgtttaagctagttattaaacactgcgatctgaataaacgaggtaactctccattacattgctatacgatgaatacacgatttaatccatctgtattaaagatattgttacaccacggcatgcgtaactttgatagcaaggatgaccactatcaatcgataacaagatctttgatatactaacggacaccattgatgactttagtaaatcatccgatctattgctgtgttatcttagatataaattcaatgggagcttaaactattacgttctgtacaaaggatccgaccctaattgcgccgacgaggatgaactcacttctcttcattactactgtaaacacatatccacgttctacgaaagcaattattacaagttaagtcacactaagatgcgagccgagaagcgattcatctacgcgataatagattatggagcaaacattaacgcggttacacacttaccttcaacagtataccaaacatagtcctcgtgtggtgtatgctcttttatctcgaggagccgatacgaggatacgtaataatcttgattgtacacccatcatggaacgattgtgcaacaggtcatattctcataatgttactcaattggcacgaacaaaaggaagaaggacaacatctactttatctattcataaaacataatcaaggatacactctcaatatactacggtatctattagataggttcgacattcagaaagacgaatactataataccgcctttcaaaattgtaacaacaatgttgcctcatacatcggatacgacatcaaccttccgactaaagacggtattcgacttggtgtttgaaaacagaaacatcatatacaaggcggatgttgtgaatgacatcatccaccacagactgaaagtatctctacctatgattaaatcgttgttctacaagatgtctctccctacgacgattactacgtaaaaaagatactagcctactgcctattaagggacgagtcattcgcggaactacatagtaaattctgtttaaacgaggactataaaagtgtatttatgaaaaatatatcattcgataagatagattccatcatcgtgacataagtcgccttaaagagattcgaatctccgacaccgacctgtatacggtatcacagctatcttaaagccatacattcagacagtcacatttcatttcccatgtacgacgatctcatagaacagtgccatctatcgatggagcgtaaaagtaaactcgtcgacaaagcactcaataaattagagtctaccatcggtcaatctagactatcgtatttgcctccggaaattatgcgcaatatcatctaaacagtatgttgtacggaaagaaccattacaaatattatccatgatagaaagaaaatatctatatgattggagaagtaggaaacaggaacaagacgacgattactacattattaaatcatgaagtccgtattatactcgtatatattgtttctctcatgtataataataaacggaagagatatagcaccgcatgcaccatccgatggaaagtgtaaagacaacgaatacaaacgccataatttgtgtccgggaacatacgcttccagattatgcgatagcaagactaacacacaatgtacgccgtgtggttcgggtaccttcacatctcgcaataatcatttacccgcttgtctaagttgtaacggaagacgcgatcgtgtaacacgactcacaatagaatctgtgaatgctctcccggatattattgtcttctcaaaggatcatccggatgcaaggcatgtgtttcccaaacaaaatgtagaataggatacggagtatccggagacgtcatctgttctccgtgtggtctcggaacatattctcacaccgtctcttccgcagataaatgcgaacccgtacccagtaatacctttaactatatcgatgtggaaattaacctgtatcccgtcaacgacacgtcgtgtactcggacgaccactaccggtctcagcgaatccatctcaacgtcggaactaactattactatgaatcataaagactgtaatcccgtctttcgtgatggatacttctccgttcttaataaggtagcgacttcaggtttctttacaggagaaaggtgtgcactctgaatttcgagattaaatgcaataacaaagattcttcctccaaacagttaacgaaagcaaagaatgatactatcatgccgcattcggagacagtaactctagtgggcgacatctatatactatatagtaataccaatactcaagactacgaaactgatacaatctcttatcatgtgggtaatgttctcgatgtcgatagccatatgcccggtagttgcgatatacataaactgatcactaattccaaacccacccactttttatagtaagtttttcacccataaataataaatacaataattaatttctcgtaaaagtagaaaatatattctaatttattgcacggtaaggaagtagaatcataaagaacagtactcaatcaatagcaattatgaaacaatatatcgtcctggcatgcatgtgcctggcggcagctgctatgcctgccagtcttcagcaatcatcctcatcctcctcctcgtgtacggaagaagaaaacaaacatcatatgggaatcgatgttattatcaaagtcacaaagcaagaccaaacaccgaccaatgataagatttgccaatccgtaacggaaattacagagtccgagtcagatccagatcccgaggtggaatcagaagatgattccacatcagtcgaggatgtagatcctcctaccacttattactccatcatcggtggaggtctgagaatgaactttggattcaccaaatgtcctcagattaaatccatctcagaatccgctgatggaaacacagtgaatgctagattgtccagcgtgtccccaggacaaggtaaggactctcccgcgatcactcatgaagaagctcttgctatgatcaaagactgtgaagtgtctatcgacatcagatgtagcgaagaagagaaagacagcgacatcaagacccatccagtactcgggtctaacatctctcataagaaagtgagttacgaagatatcatcggttcaacgatcgtcgatacaaaatgcgtcaagaatctagagtttagcgttcgtatcggagacatgtgcaaggaatcatctgaacttgaggtcaaggatggattcaagtatgtcgacggatcggcatctgaaggtgcaaccgatgatacttcactcatcgattcaacaaaactcaaagcgtgtgtctgaatcgataactctattcatctgaaattggatgagtagggttaatcgaacgattcagacacaccacgaattaaaaaagtgtaccggacactatattccggtttgcaaaacaaaaatgttcttaactacattcacaaaaagttacctctcgcgacttcttctttttctgtctcaatagtgtgatacgattatgacactattcctattcctattcctatttcctttcagagtatcacaaaaatattaaacctctttctgatggtctcataaaaaaagttttacaaaaatatttttattctctttctctctttgatggtctcataaaaaaagttttacaaaaatatttttattctctttctctctttgatggtctcataaaaaaagttttacaaaaatatttttattctctttctctctttgatggtctcataaaaaaagttttacaaaaatatttttattctctttctctctttgatggtctcataaaaaaagttttacaaaaatatttttattctctttctctctttgatggtctcataaaaaaagttttacaaaaatatttttattctctttctctctttgatggtctcataaaaaaagttttacaaaaatatttttattctctttctctctttgatggtctcataaaaaaagttttacaaaaatatttttattctctttctctctttgatggtctcataaaaaaagttttacaaaaatatttttattctctttctctctttgatggtctcataaaaaaagttttacaaaaatatttttattctctttctctctttgatggtctcataaaaaaagttttacaaaaatatttttattttctttctctctttgatggtctcataaaaaatattaaacctctttctgatggtgtcactaaaatatttttattctcattctcattttctctttctctcttcaatggagtcataaaatatttttattctctttctctcttcgatggtctcacaaaaatattaaacctctttctgatggtgtcactaaaatatttttattctcattctcattttctttttctctcttcaatggagtcataaaatatttttattctctttctctcttcgatggtctcacaaaaatattaaacctctttctgatggagtcgtaaaaaagttttatctctttctctcttcgatggtctcactaaaatattttttattctctttctgatgcatcaactatttcttaaacaataacgtccaacaacatatactcgtcgagcttatcaacatcccctatgcccatctaggttaccagacaattgtatatcataaaataatgtttataatttacacgttaaaatcatataataaaacgtagatcgtataatattttttggtatataaatgatctagtaaaatccatgtaggggatactgctcacattttttctttggtacaaaatttcacacaagtttttatacagacaaattcttgtccatatattttaaaacattgacttttgtactaagaaaaatatctagactaactatctc

SEQ ID NO: 4 - DNA, 187653 bp, Artificial Sequence
  LIVP 4.1.1
agaaagagaataaaaatatttttgtaaaactttttttatgagaccatcaaagagagaaagagaataaaaatatttttgtaaaactttttttatgagaccatcaaagagagaaagagaataaaaatatttttgtaaaactttttttatgagaccatcaaagagagaaagagaataaaaatatttttgtaaaactttttttatgagaccatcaaagagagaaagagaataaaaatatttttgtaaaactttttttatgagaccatcaaagagagaaagagaataaaaatatttttgtaaaactttttttatgagaccatcaaagagagaaagagaataaaaatatttttgtaaaactttttttatgagaccatcaaagagagaaagagaataaaaatatttttgtaaaactttttttatgagaccatcaaagagagaaagagaataaaaatatttttgtaaaactttttttatgagaccatcagaaagaggtttaatatttttgtgatactctgaaaggaaataggaataggaataggaatagtgtcataatcgtatcacactattgagacagaaaaagaagaagtcgcgagaggtaactttttgtgaatgtagttaagaacatttttgttttgcaaaccggaatatagtgtccggtacacttttttaattcgtggtgtgcctgaatcgttcgattaaccctactcatccaatttcagatgaatagagttatcgattcagacacacgctttgagttttgttgaatcgatgagtgaagtatcatcggttgcaccttcagatgccgatccgtcgacatacttgaatccatccttgacctcaagttcagatgattccttgcacatgtctccgatacgaacgctaaactctagattcttgacgcattttgtatcgacgatcgttgaaccgatgatatcttcgtaactcactttcttatgagagatgttagacccgagtactggatgggtcttgatgtcgctgtctttctcttcttcgctacatctgatgtcgatagacacttcacagtctttgatcatagcaagagcttcttcatgagtgatcgcgggagagtccttaccttgtcctggggacacgctggacaatctagcattcactgtgtttccatcagcggattctgagatggatttaatctgaggacatttggtgaatccaaagttcattctcagacctccaccgatgatggagtaataagtggtaggaggatctacatcctcgactgatgtggaatcatcttctgattccacctcgggatctggatctgactcggactctgtaatttccgttacggattggcaaatcttatcattggtcggtgtttggtcttgctttgtgactttgataataacatcgattcccatatgatgtttgttttcttcttccgtacacgaggaggaggatgaggatgattgctgaagactggcaggcatagcagctgccgccaggcacatgcatgccagtacgatatattgtttcataattgctattgattgagtactgttctttatgattctacttccttaccgtgcaataaattagaatatattttctacttttacgagaaattaattattgtatttattatttatgggtgaaaaacttactataaaaagtgggtgggtttggaattagtgatcagtttatgtatatcgcaactaccgggcatatggctatcgacatcgagaacattacccacatgataagagattgtatcagtttcgtagtcttgagtattggtattactatatagtatatagatgtcgcccactagagttactgtctccgaatgcggcatgatagtatcattctttgctttcgttaactgtttggaggaagaatctttgttattgcatttaatctcgaaattcagagtgcacacctttctcctgtaaagaaacctgaagtcgctaccttattaagaacggagaagtatccatcacgaaatacgggattacagtctttatgattcatagtaatagttagttccgacgttgagatggattcgctgagaccggtagtggtcgtccgagtacacgacgtgtcgttaactggatacaggttaatttccacatcgatatagttaaacgtatttctgggtacgggttcgcatttatctgcggaagagacggtgtgagaatatgttccgagaccacacggagaacagatgacgtctccggatactccgtatcctattccacattttgtttgggaaacacatgccttgcatccggatgatcctttgagaagacaataatatccgggagagcattcacagattctattgtgagtcgtgttacacgatcgcgtcttccgttacaacttagacaagcgggtaaatgattattgcgagatgtgaaggtacccgaaccacacggcgtacatcgtgtgttagtcttgctatcgcataatctggaagcgtatgttcccggacacagattatggcgtttgtattcgttgtctttacactttccatcggatggtgcatgcggtgctatatctcttccgtttattattatacatgagagaaacaatatatacgagtataatacggacttcataatttaataatgtagtaatcgttgtcttgttcctgtttcctacttctccaatcatggataatatttgtaatggttctttccgtacaacatactgtttagatgatattgcgcataatttccggaggcaaatacgatagtctagattggccatcgatggtagactctaatttattgagtgctttgtcgacgagtttcgatagatggcactgttctatgagatcgtcgtacatgggaaatgaaatgtgactgtctgaatgtatggctttaagatagctgtgataccgtatacaggtcggtgtcggagattcgaatctctttgaggcgacttatgtcacgatgatggaatctatcttatcgaatgatatatttttcataaatacacttttatagtcctcgtttaaacagaatttactatgtagttccgcgaatgactcgtcccttaataggcagtaggctagtatcttttttacgtagtaatcgtcgtagggagagacatcttgtagaacaacgatttaatcataggtagagatactttcagtctgtggtggatgatgtcattcacaacatccgccttgtatatgatgtttctgttttcaaacaccaagtcgaataccgtctttagtcggaaggttgatgtcgtatccgatgtatgaggcaacattgttgttacaattttgaaaggcggtattatagtattcgtctttctgaatgtcgaacctatctaatagataccgtagtatattgagagtgtatccttgattatgttttatgaatagataaagtagatgttgtccttcttccttttgttcgtgccaattgagtaacattatgagaatatgacctgttgcacaatcgttccatgatgggtgtacaatcaagattattacgtatcctcgtatcggctcctcgagataaaagagcatacaccacacgaggactatgtttggtatactgttgaaggtaagtgtgtaaccgcgttaatgtttgctccataatctattatcgcgtagatgaatcgcttctcggctcgcatcttagtgtgacttaacttgtaataattgctttcgtagaacgtggatatgtgtttacagtagtaatgaagagaagtgagttcatcctcgtcggcgcaattagggtcggatcctttgtacagaacgtaatagtttaagctcccattgaatttatatctaagataacacagcaatagatcggatgatttactaaagtcatcaatggtgtccgttagtatatcaaagatcttgttatcgattgatagtggtcatccttgctatcaaagttacgcatgccgtggtgtaacaatatctttaatacagatggattaaatcgtgtattcatcgtatagcaatgtaatggagagttacctcgtttattcagatcgcagtgtttaataactagcttaaacagatgagacgatgtatccacatcaaagaacgtaaaatacatatgacagacattgttgacagaaacgtgaccttcattcttaccgtcgtccataaatacgttaggtatgtaccacatactgtcgcgaacgatgcgtacaatctcgtccatctcataatgatttactttttcataattaaagatgtgaaagaaaaccgaacaatatatttttttagtaatgtttatgcgagacatataaaataaactccgtgtttatgatgccggtaaatgtttttatcatcttggacggaatcgattttgtaatatgtcatggaaacaaatgaaacaggacattatcgctccatgataaattatttaatggagtaataaagtatctccatgggtaatttcgaaatcaagttatcgtctgtattaatgttgtccactatggagtcgatcctctcattgttctttacagtttctgtaatgatggacgttagttcttttttgtaccatttgatgtcggattctttgcgtatctcaatctgtggcgtttgcttcgtttaaataatatatcaaacatggagacgcctgatatgtaggcattcttcattctattaatgtctactctatagcgctttagttccttatgacgaccggcgatatcatactttactttagaaggaaaatcatcatctaggattaaggcgtatctgatacatgccgataatggttcaggatatagatagcgtatatctctattaaatgcgtcaatcatagtctctagagtgggatggtaactcagtaataaatcaactatcctcgttttgttttctctttggtaactgcttttctggatggccgtattgattatcgagcgtgatgttgtgacactcgctccatattccaataaccgctttgcaaattgtatattattgacatcgaccgcgtaatatagtagagttatcgatcatatctatatcatccatgtacttgcttagtatatcaaatacatctatcagtatggtttcataacagtgatacccgcaattattaaatctcgataatatcagaccgtacatacatagacggccattgttcgatatgtgatttacagccgcgtgtccatattttccacgataaaccttacgacgtttacatcgacgagattattattaacaaagtagtcgtgtagaggatagttgttgtccgtcgtcttatccatggttgctccgttatctaacatgcattgaatgataggtatacttaccatatcgccgtaatgtaagtagtttatcaacatggcttgtacatcctgttgtctaaatctctttagaatgttatcgatgatgtagtggttatattctctggaatcgtacgaagtaatactacgcattacgtcgacaagagtatgacgtctctcaataagaagattaacgatttccatgtctacattatatggggttactctaaatcgcttgtttagataatacgcctctaatatagggctgacgtcgtatactctacacgtgtccacatcctttattaataataatttaacaatctctatatctatggttgagaaagaccagtagtattggatgggtaaagatcctccttcgtctctgccatggatggaaacattgttatcgatcaaacatttaattacatccttggatagagattgagattctctatgagacgatatatagtaatgaagagagttcttacacatatcactgtcgtacatacaggtacgaaatacgtaaccggtgctgtaacattctgatttaagaagccatagcaatacttctggtctcggattaggcgtcgttacgtatatatccaccaatccgagaccattgattgcataattcgtattcttggacggacgtatccgtttatccacaattaggtattttagcagacgtaagtcgatattatccgaatacagatcgaaatcatttatattcgacttgagttcgttagaggaatttgaatagctggatatcagtagatgcacaatctgagattttacgtatctatgcttactgtatactcctagcggagttaatccttcgttgtttctacaaagtctctcgactccgcgagagaacaatcttaatgtctgtatcgcatttattggagacgtaacaatgtagcgcattgtttcctcgtctatctatatgttttgataagttgtgacacgtttcaatttctagttttatttttttgtacgtcacatcttcatccagtagacgacatagaatagtgcactctaccacaataatccatagctattctggtgctaattattcctatttcacgaaggcaatcattcctcataagatgataaaaagtgtagtggagatttagtatttagcagtgcggatatgatccaagagggtgagatagtcgttctcgttcagaatctttcgcagcataagtagtatgtcgatatacttatcgttgaagactctttataaaagtctatttgtttatatttattgcggatagcagtatttccctataaaaagtatacgtcctgtggtgtctttaatcatgtacatgaatggatggtttatgtagaccttcgtacgatataccatcgaaaagttaatcgtaaatactcctgtaacggccgatgcttctgtatactcctcattaacatctataaacgtcgtatgtagaaatttttctacagtgatagtttcattacacatcttgctaaaatctgcataatatccgaatatattagtaagtcctaaattttctaaaatcggtaccagattatacggttctgtcatttccactttaaactttggcatatacaagtctatacttttagtagataacataccacaccattttttaaatttttcatctgttatatttttttctatgttatatataccttctatgtcgtccggtagtataattaccatactagagtttccctcgtatggaatatcgataatagagaatcctccgaataattcattaatatgtacatattgcaagttattctcggtacccaccatcatatcaacgctggtaactatattcttagaaatataaaacttgtctgtatatgtaagatgtttagaaaatggatatttccacattgctttaaaatggacggcgctaacaactgtcatacgagtattaatggatagcggactagtcaataaggaattaattttaccatttgtcattgtcttaacccattcgttgattagttcctttgtttggttagcattattaaagtttacagtttgaaaatcgtcttttattttttgtaggaaggaggcgtggaactcgatactatcgctaccgtatattttatttgcggtagctagtgtcgcacaatacggaatatctacctccatgtcatcattattgtcatcgggtgtattctcattcatattctctatatattttgatagttgttcagctgtagaaccagctgctccatgatttagaatagataaagtagataaaatggaaactggagaaatcaaaacattttcatcagggtgttttaagattagttctttaaagatatccatggtatagacctaacgataacgatatatatcataaataaataatgttaaatttcaatttatgtttgtaccccgtattcatacttaacaaattggtattgcgtacacaatcaatcatattacataccattaataatgcaagcataaaaaattgttagtagatgtttctaaatataggttccgtaagcaaagaatataagaatgaagcggtaatgataaaatcaatcgttatctaaaatgatcatactcatttattttattctattatattaacacatacatttttaacagcaacacattcaatattgtattgttatttttatattatttacacaattaacaatatattattagtttatattactgaattaataatataaaattcccaatcttgtcataaacacacactgagaaacagcataaacacagaatccatcaaaaatgttgataaattatctgatgttgttgttcgctgctatgataatcagatcattcgccgatagtggtaacgctatcgaaacgacattgccagaaattacaaacgctacaacagatattccagctatcagattatgcggtccagagggagatggatattgtttacacggtgactgtatccacgctagagatattgacggtatgtattgtagatgctctcatggttatacaggcattagatgtcagcatgtagtattagtagactatcaacgttcagaaaacccaaacactacaacgtcatatatcccatctcccggtattatgcttgtattagtaggcattattatgtgttgtctattatctgtttataggttcactcgacgaactaaactacctatacaagatatggttgtgccataatttttataaatttttttatgagtatttttacaaaaatgtataaagtgtatgtcttatgtatatttataaaaatgctaagtatgcgatgtatctatgttatttgtatttatctaaacaatacctctacctctagatattatacaaaaattttttatttcggcatattaaagtaaaatctagttaccttgaaaatgaatacagtgggtggttccgtatcaccagtaagaacataatagtcaaatacagtatccgattgagattttgcatacaatactagtctagaaagaaatttgtaatcatcttctgtgacgggagtccatatatctgtatcatcgtctagtttatcagtgtcccatgctatattcctgttatcatcattagttaatgaaaataactctcgtgcttcagaaaagtcaaatattgtatccatacatacatctccaaaactatcgcttatacgtttatctttaacgatacctatacctagatggttatttactaacagacattttccagatctattgactataactcctatagtttccacatcaaccaagtaatgatcatctattgttatataacaataacataactcttttccatttttatcagtatgtatatctatatcaacgtcgtcgttgtagtgaatagtagtcattgatctattatatgaaacggatatgtctagaacggcaattgttttacgtccagttaacactttcgttgatttaaagtctagagtctttgcaaacataatatccttatccgactttatatttcctgtagggtggtataattttattttgcctccacatatcggtgtttccaaatatattactagacaatattccatatagttattagttaagggtacccaattagaacacgtacgcttattatcatcatttggatcgtatttcataaaagttattgtgttatcgatgtcaacacattctacattttttaatcgtctatatagtatttttctgatattttctataatatcagaattgtcttccatcggaagttgtatactatcggaatcagttacatgtttaaataattctctgatgtcattccttatacaatcaaattcattattaaacagtttaatagtctgtagacctttatcgtcgtaaatatccattgtcttattagttacgcttatttttatgtgtttttacgttgctttattatattttataagaatgattgtttgacgaatcacgagaactattaagacacattattaggtatatattataaaaaagtttttgattacgatgttataagaggaaagaggacacattaacatcatacatcaattaactacattcttataacatcgtaatcaaaagaattgcaattttgatgtataacaactgtcaatgggttatggaattgtatattacatattatacggtatgttggtaacgacaaataccggtcggtaattgtctgccggtgtaatagaattatatatatctatctattacaccggccttgtatacataataataagttgtggtagtatgatctccatatttataatttaggactttgtattcagtatttttggaatcataaaaaataaaaaaaagttttactaatttaaaatttaaaaagtatttacatttttttcactgtttagtcgcggatatggaattcgatcctgccaaaatcaatacatcatctatagatcatgtaacaatattacaatacatagatgaaccaaatgatataagactaacagtatgcattatccgaaatattatatcaatatcacaaaaataaatacacatttggctaatcaatttcgggcttggaaaaaacgtatcgccggaagggactatatgactaacttatctagagatacaggaatacaacaatcaaaacttactgaaactatacgtaactgtcaaaaaaatagaaacatatatggtctatatatacactacaatttagttattaattggataaccgatgtgattatcaatcaatattaagagggttggtaaattggtacatagctaataatacctatacacccaataatacaacaaccatttctgagttggatatcatcaaaatactaaataaatacgaggacgtgtatagagtaagtaaagaaaaagaatgtggaatttgctatgaagttgtttactcaaaacgatagatactttggtttattggattcgtgtactcatatattttgcataacatgcatcaatatatggcatagaacacgaagagaaaccggtgcgtcggataattgtcctatatgccgtacccgttttagaaacataacaatgagcaagttctataagctagttaactaataaataaaaagtttaatttgttgacgacgtatgtcgttattttttctcgtataaaagattaatttgattctaatataatctttagtattggataaatatcaattcaaattaattccattagattatatcataaataaaaatagtagcacacaactacttcagccaaatattcttttttgaaacgccatctatcgtagtgaggacacaagtgaacctataattatcaaatttattagtatcggttacatgaaggactttacgtagagtgacgattccactatctgtggtacgaacggtttcatcttctttgatgccatcacccagatgttctataaacttggtatcctcgtccgatctcatatcctttgccaaccaatacatgtagctaaaattaggcataaatttcacacatcctgaacaatgaaattctccagaagatgttacaatgtctagatttggacatttggtttcaaccgcgttaacatatgagtgaacacacccatacatgaaagcgatgagaaataggattctcatcttgccaaaatatcactagaaaaaatttatttatcagttttaaaggtataaaaaatacttattgttgctcgaatattttgtatttgatggtatacggaagattagaaatgtaggtattatcatcaactgattctatggttttatgtattctatcatgtttcactattgcgttggaaataatatcatatgcttccacatatattttattttgttttaactcataatactcacgtaattctggattattggcatatctatgaataattttagctccatgatcagtaaatattaatgagaacatagtattaccacctaccattatttttttcatctcattcaattcttaattgcaaagatctatataatcattatagcgttgacttatggactctggaatcttagacgatgtacagtcatctataatcatggcatatttaatacattgttttatagcatagtcgttatctacgatgttagatatttctctcaatgaatcaatcacacaatctaatgtaggtttatgacataatagcattttcagcagttcaatgtttttagattcgttgatggcaatggctatacatgtatatccgttatttgatctaatgttgacatctgaaccggattctagcagtaaagatactagagattgtttattatatctaacagccttgtgaagaagtgtttctcctcgtttgtcaatcatgttaatgtctttaagataaggtaggcaaatgtttatagtactaagaattgggcaagcataagacatgtcacaaagacccttttttgtatgtataagtgtaaaaattataacatccatagttggatttacataggtgtccaatcgggatctctccatcatcgagataattgatggcatctcccttccttttttagtagatatttcatcgtgtaagaatcaatattaatatttctaaagtatccgtgtatagcctctttatttaccacagctccatattccactagagggatatcgccgaatgtcatatactcaattagtatatgttggaggacatccgagttcattgttttcaatatcaaagagatggtttccttatcatttctccatagtggtacaatactacacattattccgtgcggctttccattttccaaaaacaatttgaccaaatctaaatctacatctttattgtatctataatcactatttagataatcagccataattcctcgagtgcaacatgttagatcgtctatatatgaataagcagtgttatctattcctttcattaacaatttaacgatgtctatatctatatgagatgacttaatataatattgaagagctgtacaatagtttttatctataaaagacggcttgattccgtgattaattagacatttaacaacttccggacgcacatatgctctcgtatccgactctgaatacagatgagagatgatatacagatgcaatacggtaccgcaatttcgtagttgataatcatcatacgcgtatcagtactcgtcctcataaagaacactgcagccattttctatgaacaaatcaataattttagaaacaggatcattgtcattacataattttctataactgaacgatggttttcacatttaacactcaagtcaaatccatgttctaccaacacctttatcaagtcaacgtctacatttttggatttcatatagctgaatatattaaagttatttatgttgctaaatccagtggcttctagtagagccatcgctatatccttattaactttaacatgtctactatttgtgtattcttctaatggggtaagctgtctccaatttttgcgtaatggattagtgccactgtctagtagtagtttgacgacctcgacattattacaatgctcattaaaaaggtatgcgtgtaaagcattattcttgaattggttcctggtatcattaggatctctgtctttcaacatctgtttaagttcatcaagagccacctcctcattttccaaatagtcaaacattttgactgaatgagctactgtgaactctatacacccacacaactaatgtcattaaatatcatgtcaaaaacttgtacaattattaataaaaataatttagtgtttaaattttaccagttccagattttacacctccgttaatacctccattaaccccactggacgatcctcctccccacattccaccgccaccagatgtataagttttagatcctttattactaccatcatgtccatggataaagacactccacatgccgccactaccccctttagaagacatattaataagacttaaggacaagtttaacaataaaattaatcacgagtaccctactaccaacctacactattatatgattatagtttctatttttacagtaccttgactaaagtttctagtcacaagagcaatactaccaacctacactattatatgattatagtttctatttttataggaacgcgtacgagaaaatcaaatgtctaatttctaacggtagtgttgataaacgattgttatccgcggatacctcctctatcatgtcgtctattttcttactttgttctattaacttattagcattatatattatttgattataaaacttatattgcttattagcccaatctgtaaatatcggattattaacatatcgtttctttgtaggtttatttaacatgtacatcactgtaagcatgtccttaccatttattttaatttgacgcatatccgcaatttctttttcgcagtcggttataaattctatatatgatggatacatgctacatgtgtacttataatcgactaatatgaagtacttgatacatattttcagtaacgatttattattaccacctatgaataagtacctgtgatcgtctaggtaatcaactgttttcttaatacattcgatggttggtaatttactcagaataatttccaatatcttaatatataattctgctatttctgggatatatttatctgccagtataacacaaatagtaatacatgtaaacccatattttgttattatattaatgtctgcgccattatctattaaccattctactaggctgacactatgcgactcaatacaatgataaagtatactacatccatgtttatctattttgtttatatcatcaatatacggcttacaaagttttagtatcgataacacatccaactcacgcatagagaaggtagggaataatggcataatatttattaggttatcatcattgtcattatctacaactaagtttccattttttaaaatatactcgacaactttaggatctctattgccaaatttttgaaaatatttatttatatgcttaaatctatataatgtagctccttcatcaatcatacatttaataacattgatgtatactgtatgataagatacatattctaacaatagatcttgtatagaatctgtatatcttttaagaattgtggatattaggatattattacataaactattacacaattctaaaatataaaacgtatcacggtcgaataatagttgatcaactatataattatcgattttgtgatttttcttcctaaactgtttacgtaaatagttagatagaatattcattagttcatgaccactatagttactatcgaataacgcgtcaaatatttcccgtttaatatcgcatttgtcaagataataatagagtgtggtatgttcacgataagtataataacgcatctctttttcgtgtgaaattaaatagtttattacgtccaaagatgtagcataaccatcttgtgacctagtaataatataataatagagaactgttttacccattctatcatcataatcagtggtgtagtcgtaatcgtaatcgtctaattcatcatcccaattataatattcaccagcacgtctaatctgttctattttgatcttgtatccatactgtatgttgctacatgtaggtattcctttatccaataatagtttaaacacatctacattgggatttgatgttgtagcgtatttttctacaatattaataccatttttgatactatttatttctatacctttcgaaattagtaatttcaataagtctatattgatgttatcagaacatagatattcgaatatatcaaaatcattgatatttttatagtcgactgacgacaataacaaaatcacaacatcgtttttgatattattatttttcttggtaacgtatgcctttaatggagtttcaccatcatactcatataatggatttgcaccactttctatcaatgattgtgcactgctggcatcgatgttaaatgttttacaactatcatagagtatcttatcgttaaccatgattggttgttgatgctatcgcattttttggtttctttcatttcagttatgtatggatttagcacgtttgggaagcatgagctcatatgatttcagtactgtagtgtcagtactattagtttcaataagatcaatctctagatctatagaatcaaaacacgataggtcagaagataatgaatatctgtaggcttcttgttgtactgtaacttctggttttgttagatggttgcatcgtgctttaacgtcaatggtacaaattttatcctcgctttgtgtatcatattcgtccctactataaaattgtatattcagattatcatgcgatgtgtatacgctaacggtatcaataaacggagcacaccatttagtcataaccgtaatccaaaaatttttaaagtatatcttaacgaaagaagttgtgtcattgtctacggtgtatggtactagatcctcataagtgtatatatctagagtaatgtttaatttattaaatggttgataatatggatcctcgtgacaatttccgaagatggaaataagacataaacacgcaataaatctaattgcggacatggttactccttaaaaaaatacgaataatcaccttggctatttagtaagtgtcatttaacactatactcatattaatccatggactcataatctctatacgggattaacggatgttctatatacggggatgagtagttctcttctttaactttatactttttactaatcatatttagactgatgtatgggtaatagtgtttgaagagctcgttctcatcatcagaataaatcaatatctctgtttttttgttatacagatgtattacagcctcatatattacgtaatagaacgtgtcatctaccttattaactttcaccgcatagttgtttgcaaatacggttaatcctttgacctcgtcgatttccgaccaatctgggcgtataatgaatctaaactttaattgcttgtaatcattcgaaataatttttagtttgcatccgtagttatcccctttatgtaactgtaaatttctcaacgcgatatctccattaataatgatgtcgaattcgtgctgtatacccatactgaatggatgaacgaataccgacggcgttaatagtaatttactttttcatctttacatattgggtactagttttactatcataagtttataaattccacaagctactatggaataagccaaccatcttagtataccacacatgtcttaaagtttattaattaattacatgttgttttatatatatcgctacgaatttaaagagaaattagtttaggaagaaaaattatctatctacatcatcacgtctctgtattctacgatagagtgctactttaagatgcgacagatccgtgtcatcaaatatatactccattaaaatgattattccggcagcgaacttgatattggatatatcacaacctttgttaatatctacgacaatagacagcagtcccatggttccataaacagtgagtttatctttctttgaagagatattttgtagagatcttataaaactgtcgaatgacatcgcatttatatctttagctaaatcgtatatgttaccatcgtaatatctaaccgcgtctatcttaaacgtttccatcgctttaaagacgtttccgatagatggtctcatttcatcagtcatactgagccaacaaatataatcgtgtataacatctttgatagaatcagactctaaagaaaacgaatcggctttattatacgcattcatgataaacttaatgaaaaatgtttttcgttgtttaagttggatgaatagtatgtcttaataattgttattatttcattaattaatatttagtaacgagtacactctataaaaacgagaatgacataactaatcataactagttatcaaagtgtctaggacgcgtaattttcatatggtatagatcctgtaagcattgtctgtattctggagctattttctctatcgcattagtgagttcagaatatgttataaatttaaatcgaataacgaacataactttagtaaagtcgtctatattaactcttttattttctagccatcgtaataccatgtttaagatagtatattctctagttactacgatctcatcgttgtctagaatatcacatactgaatctacatccaattttagaaattggtctgtgttacatatctcttctatattattgttgatgtattgtcgtagaaaactattacgtagaccattttctttataaaacgaatatatagtactccaattatctttaccgatatatttgcacacataatccattctctcaatcactacatctttaagattttcgttgttaagatatttggctaaactatataattctattagatcatcaacagaatcagtatatatttttctagatccaaagacgaactctttggcgtcctctataatattcccagaaaagatattttcgtgttttagtttatcgagatctgatctgttcatatacgccatgattgtacggtacgttatgataaccgcataaaataaaaatccattttcatttttaaccaatactattcataattgagattgatgtaatactttgttactttgaacgtaaagacagtacacggatccgtatctccaacaagcacgtagtaatcaaatttggtgttgttaaacttcgcaatattcatcaatttagatagaaacttatactcatcatctgttttaggaatccatgtattattaccactttccaacttatcattatcccaggctatgtttcgtccatcatcgttgcgcagagtgaataattcttttgtattcggtagttcaaatatatgatccatgcatagatcggcaaagctattgtagatgtgatttttcctaaatctaatataaaactcgtttactagcaaacactttcctgatttatcgaccaagacacatatggtttctaaatctatcaagtggtggggatccatagttatgacgcagtaacatatattattacattcttgactgtcgctaatatctaaatatttattgttatcgtattggattctgcatatagatggcttgtatgtcaaagatatagaacacataaccaatttatagtcgcgctttacattctcgaatctaaagttaagagatttagaaaacattatatcctcggatgatgttatcactgtttctggagtaggatatattaaagtctttacagatttcgtccgattcaaataaatcactaaataatatcccacattatcatctgttagagtagtatcattaaatctattatattttatgaaagatatatcactgctcacctctatatttcgtacatttttaaactgtttgtataatatctctctgatacaatcagatatatctattgtgtcggtagacgataccgttacatttgaattaatggtgttccattttacaacgtttaacaagttgaccaattcatttttaatagtatcaaactctccatgattaaatattttaatagtatccattttatatcactacggacacaaagtagctgacataaaccattgtataatttttatgttttatgtttattagcgtacacattttggaagttccggcttccatgtatttcctggagagcaagtagatgatgaggaaccagataggttatatccgtacttgcacttaaagtttacattgtcgttgtatgagtatgatcttttaaacccgctagacaagtatccgtttgatattgtaggatgtggacatttaacaatctgacacgtgggtggatcggaccattctcctcctgaacacaggacactagagttaccaatcaacgaatatccactattgcaactataagttacaacgctcccatcggtataaaaatcctcgtatccgttatgtcttccgttggatatagatggaggggattggcatttaacagattcacaaataggtgcctcgggattccataccatagatccagtagatcctaattcacaatacgatttagattcaccgatcaactgatatccgctattacaagagtacgttatactagagccaaagtctactccaccaatatcaagttggccattatcgatatctcgaggcgatgggcatctccgtttaatacattgattaaagagtgtccatccagtacctgtacatttagcatatataggtcccattttttgctttctgtatccaggtagacatagatattctatagtgtctcctatgttgtaattagcattagcatcagtctccacactattcttaaatttcatattaatgggtcgtgacggaatagtacagcatgatagaacgcatcctattcccaacaatgtcaggaacgtcacgctctccaccttcatatttatttatccgtaaaaatgttatcctggacatcgtacaaataataaaaagcccatatatgttcgctattgtagaaattgtttttcacagttgctcaaaaacgatggcagtgacttatgagttacgttacactttggagtctcatctttagtaaacatatcataatattcgatattacgagttgacatatcgaacaaattccaagtatttgattttggataatattcgtattttgcatctgctataattaagatataatcaccgcaagaacacacgaacatctttcctacatggttaaagtacatgtacaattctatccatttgtcttccttaactatatatttgtatagataattacgagtctcgtgagtaattccagtaattacatagatgtcgccgtcgtactctacagcataaactatactatgatgtctaggcatgggagacttttttatccaacgatttttagtgaaacattccacatcgtttaatactacatatttctcatacgtggtataaactccacccattacatatatatcatcgtttacgaataccgacgcgcctgaatatctaggagtaattaagtttggaagtcttatccatttcgaagtgccgtgtttcaaatattctgccacacccgttgaaatagaaaattctaatcctcctattacatataactttccatcgttaacacaagtactaacttctgattttaacgacgacatattagtaaccgttttccattttttcgttttaagatctacccgcgatacggaataaacatgtctattgttaatcatgccgccaataatgtatagacaattatgtaaaacatttgcattatagaattgtctatctgtattaccgactatcgtccaatattctgttctaggagagtaatgggttattgtggatatataatcagagtttttaatgactactatattatgttttataccatttcgtgtcactggctttgtagatttggatatagttaatcccaacaatgatatagcattgcgcatagtattagtcataaacttgggatgtaaaatgttgatgatatctacatcgtttggatttttatgtatccactttaataatatcatagctgtaacatcctcatgatttacgttaacgtcttcgtgggataagatagttgtcagttcatcctttgataattttccaaattctggatcggatgtcaccgcagtaatattgttgattatttctgacatcgacgcattatatagttttttaattccatatcttttagaaaagttaaacatccttatacaatttgtgaaattaatattatgaatcatagtttttacacatagatctactacaggcggaacatcaattattatggcagcaactagtatcatttctacattgtttatggtgatgtttatcttcttccagcgcatatagtctaatagcgattcaaacgcgtgatagtttataccattcaatataatcgcttcatcctttagatggtgatcctgaatgcgtttaaaaaaattatacggagacgccgtaataatttccttattcacttgtataatttccccattgatagaaaatattacgctttccattcttaaagtactataagtaattatagtataatgtaaacgtttatatattcaatatttttataaaaatcattttgacattaattcctttttaaatttccgtctatcatctatagaaacgtattctatgaatttataaaatgcttttacgtgtcctatcgtaggcgatagaaccgctaaaaagcctatcgaatttctacaaaagaatctgttatatggtatagggagagtataaaacattaaatgtccgtacttattaaagtattcagtagccaatcctaactctttcgaatacttattaatggctcttgttctgtacgaatctatttttttgaacaacggacctagtggtatatcttgttctatgtatctaaaataatgtctgactagatccgttagtttaatatccgcagtcatcttgtctagaatggcaaatctaactgcgggtttaggctttagtttagtttctatatctacatctatgtctttatctaacaccaaaaatataatagctaatattttattacaatcatccggatattcttctacgatctcactaactaatgtttctttggttatactagtatagtcactatcggacaaataaagaaaatcagatgatcgatgaataatacatttaaattcatcatctgtaagatttttgagatgtctcattagaatattattagggttagtactcattatcattcggcagctattacttattttattatttttcaccatatagatcaatcattagatcatcaaaatatgtttcaatcatcctaaagagtatggtaaatgactcttcccatctaatttctgaacgttcaccaatgtctctagccactttggcactaatagcgatcattcgcttagcgtcttctatattattaactggttgattcaatctatctagcaatggaccgtcggacagcgtcattctcatgttcttaatcaatgtacatacatcgccgtcatctaccaattcatccaacaacataagctttttaaaatcatcattataataggtttgatcgttgtcatttctccaaagaatatatctaataagtagagtcctcatgcttagttaacaactattttttatgttaaatcaattagtacaccgctatgtttaatacttattcatattttagtttttaggattgagaatcaatacaaaaattaatgcatcattaattttagaaatacttagtttccacgtagtcaatgaaacatttgaactcatcgtacaggacgttctcgtacaggacgtaactataaaccggtttatatttgttcaagatagatacaaatccgataactttttttacgaattctacgggatccactttaaaagtgtcataccgggttctttttatttttttaaacagatcaatggtgtgatgttgattaggtcttttacgaatttgatatagaatagcgtttacatatcctccataatggtcaatcgccatttgttcgtatgtcataaattctttaattatatgacactgtgtattatttagttcatccttgttcattgttaggaatctatccaaaatggcaattatactagaactataggtgcgttgtatacacatattgatgtgtctgtttatacaatcaatgctactaccttcgggtaaaattgtagcatcatataccatttctagtactttaggttcattattatccattgcagaggacgtcatgatcgaatcataaaaaaatatattatttttatgttattttgttaaaaataatcatcgaatacttcgtaagatactccttcatgaacataatcagttacaaaacgtttatatgaagtaaagtatctacgatttttacaaaagtccggatgcataagtacaaagtacgcgataaacggaataataatagatttatctagtctatctttttctatagctttcatagttagatacatggtctcagaagtaggattatgtaacatcagcttcgataaaatgactgggttatttagtcttacacattcgctcatacatgtatgaccgttaactacagagtctacactaaaatgattgaacaatagatagtctaccattgtttcgtattcagatagtacagcgtagtacatggcatcttcacaaattatatcattgtctaatagatatttgacgcatcttatggatcccacttcaacagccatcttaaaatcggtagaatcatattgctttcctttatcattaataatttctagaacatcatctctatcataaaagatacaaatattaactgtttgatccgtaataacattgctagtcgatagcaatttgttaataagatgcgctgggctcaatgtcttaataagaagtgtaagaggactatctccgaatttgttttgtttattaacatccgttgatggaagtaaaagatctataatgtctacattcttgactgttttagagcatacaatatggagaggtgtatttccatcatgatctggttttgagggactaattcctagtttcatcatccatgagattgtagaagcttttggattgtctgacataagatgtctatgaatatgatttttgccaaatttatccactatcctggcttcgaatccgatggacattatttttttaaacactctttctgaaggatctgtacacgccaacaacggaccacatccttcttcatcaaccgagttgttaatcttggctccatactgtaccaataaatttattctctctatgacttcatcatctgttcccgagagataatatagaggcgttttatgctgtttatcacacgcgtttggatctgcgccgtgcgtcagcagcatcgcgactattctattattattaattttagaagctatatgcaatggataatttccatcatcatccgtctcatttggagagtatcctctatgaagaagttcttcgacaaatcgttcatctagtcctttaattccacaatacgcatgtagaatgtgataattatttccagaaggttcgatagcttgtagcatattcctaaatacatctaaatttttactattatatttggcataaagagatagataatactcggccgacataatgttgtccattgtagtataaaaattaatatttctatttctgtatatttgcaacaatttactctctataacaaatatcataacttagttcttttatgtcaagaaggcactggtttagttcatctataaatgtcacgccataactaccacgcatgccatactcagaattatgataaagatatttatccttggggtgtaggtaatggggattaatctttgttggatcagtctctaagttaacacatgtcacacatgatccatttatagttatatcacacgatgatgatttatgaattgattccggaagatcgctatcgtattttgtggttccacaattcatttccatacatgttattgtcacactaatattatgatgaactttatctagccgctgagtggtaaacaacagaacagatagtttattatctttaccaacaccctcagccgctgccacaaatctctgatccgtatccatgatggtcatgtttatttctagtccgtatccagtcaacactatgttagcatttctgtcgatatagctttcactcatatgacactcaccaataatagtagaattaatgtcgtaatttacaccaatagtgagttcggcggcaaagtaccaataccggtaatcttgtcgaggaggacatatagtattcttgtattctaccgaatacccgagagatgcgatacaaaagagcaagactaatttgtaaaccatcttactcaaaatatgtaacaatagtacgatgcaatgagtaagacaataggaaatctatcttatatacacataattattctatcaattttaccaattagttagtgtaatgttaacaaaaatgtgggagaatctaattagtttttctttacacaattgacgtacatgagtctgagttccttgtttttgctaattatttcatccaatttattattcttgacgatatcgagatcttttgtataggagtcaaacttgtattcaacatgcttttctataatcattttagctatttcggcatcatccaatagtacattttccagattagcagaatagatattaatgtcgtatttgaacagagcctgtaacatctcaatgtctttattatctatagccaatttaatgtccggaatgaagagaagggaattattggtgtttgtcgacgtcatatagtcgagcaagagaatcatcatatccacgtgtccattttttatagtgatgtgaatacaactaaggagaatagccagatcaaaagtagatggtatctctgaaagaaagtaggaaacaatacttacatcattaagcatgacggcatgataaaatgaagttttccatccagttttcccatagaacatcagtctccaatttttcttaacaaacagttttaccgtttgcatgttaccactatcaaccgcataatacaatgcggtgtttcccttgtcatcaaattgtgaatcatccagtccactgaatagcaaaatctttactattttggtatcttccaatgtggctgcctgatgtaatggaaattcattctctagaagatttttcaatgctccagcgttcaacaacgtacatactagacgcacgttattatcagctattgcataatacaaggcactatgtccatggacatccgccttaaatgtatctttactagagagaaagcttttcagctgcttagacttccaagtattaattcgtgacagatccatgtctgaaacgagacgctaattagtgtatattttttcattttttataattttgtcatattgcaccagaattaataatatctctaatagatctgattagtagatacatggctatcgcaaaacaacatatacacatttaataaaaataatatttattaagaaaattcagatttcacgtacccatcaatataaataaaataatgattccttacaccgtacccatattaaggagattccaccttacccataaacaatataaatccagtaatatcatgtctgatgatgaacacaaatggtgtattaaattccagtttttcaggagatgatctcgccgtagctaccataatagtagatgcctctgctacagttccttgttcgtcgacatctatctttgcattctgaaacattttataaatatataatgggtccctagtcatatgtttaaacgacgcattatctggattaaacatactaggagccatcatttcggctatcgacttaatatccctcttattttcgatagaaaatttagggagtttaagattgtacactttattccctaattgagacgaccaatagtctaattttgcagccgtgatagaatctgtgaaatgggtcatattatcacctattgccaggtacatactaatattagcatccttatacggaaggcgtaccatgtcatattctttgtcatcgattgtgattgtatttccttgcaatttagtaactacgttcatcatgggaaccgttttcgtaccgtacttattagtaaaactagcattgcgtgttttagtgatatcaaacggatattgccatatacctttaaaatatatagtattaatgattgcccatagagtattattgtcgagcatattagaatctactacattagacataccggatctacgttctactatagaattaattttattaaccgcatctcgtctaaagtttaatctatataggccgaatctatgatattgttgataatacgacggtttaatacacacagtattatctacgaaactttgataagttagatcagtgtacgtatatttagatgttttcagcttagctaatcctgatattaattctgtaaatgctggacccagatctctttttctcaaatccatagtcttcaataattctattctagtattacctgatgcaggcaatagcgacataaacatagaaaacgaatagccaaacggcgagaagacaatattatcatcttgaatatttttatacgctactataccggcattggtaaatccttgtagacgataggcggacgctgaacacgctaacgatagtatcaataacgcaatcatgattttatggtattaataattaaccttatttttatgttcggtataaaaattattgatgtctacacatccttttgtaattgacatctatatatccttttgtataatcaactctaatcactttaacttttacagttttccctaccagtttatccctatattcaacatatctatccatatgcatcttaacactctctgccaagatagcttcagagtgaggatagtcaaaaagataaatatatagagcataatcattctcgtatactctgccctttattacatcacccgcattgggcaacgaataacaaaatgcaagcatcttgttaacgggctcgtaaattgggataaaaattatgtttttattgattttatatctattttattcaagagaatattcaggaatttctttttccggttgtatctcgtcgcagtatatatcatttgtacattgtttcatattttttaatagtttacaccttttagtaggactagtatcgtacaattcatagctgtattttgaattccaatcacgcataaaaatatcttccaattgttgacgaagacctaatccatcatccggtgtaatattaatagatgctccacatgtatccgtaaagtaatttcctgtccaatttgaggtacctatataggccgttttatcggttaccatatatttggcatggtttaccctagaatacggaatgggaggatcagcatctggtacaataaatagctttacttctatatttatgtttttagattttagcatagcgatagatcttaaaaagtttctcatgataaacgaagatcgttgccagcaactaatcaatagcttaacggatacttgtctgtctatagcggatcttcttaattcatcttctatataaggccaaaacaaaattttacccgccttcgaataaataatagggataaagttcataacagatacataaacgaatttactcgcatttctaatacatgacaataaagcggttaaatcattggttctttccatagtacatagttgttgcggtgcagaagcaataaatacagagtgtggaacgccgcttacgttaatactaagaggatgatctgtattataatacgacggataaaagtttttccaattatatggtagattgttaactccaagataccagtatacctcaaaaatttgagtgagatccgctgccaagttcctattattgaagatcgcaatacccaattccttgacctgagttagtgatctccaatccatgttagcgcttcctaaataaatatgtgtattatcagatatccaaaattttgtatgaagaactcctcctaggatatttgtaatatctatgtatcgtacttcaactccggccatttgtagtctttcaacatcctttaatggtttgttagatttattaacggctactctaactcgtactcctcttttgggtaattgtacaatctcgtttaatattatcgtgccgaaattcgtacccacttcatccgataaactccaataaaaagatgatatatctagtgtttttgtggtattggatagaatttccctccacatgttaaatgtagacaaatatactttatcaaattgcatacctataggaatagtttctgtaatcactgcgattgtattatccggattcattttatttgttaaaagaataatcctatatcacttcactctattaaaaatccaagtttctatttctttcatgactgattttttaacttcatccgtttccttatgaagatgatgtttggcaccttcataaatttttatttctctattacaatttgcatgttgcatgaaataatatgcacctaaaacatcgctaatcttattgtttgttccctggagtatgagagtcgggggggtgttaatcttggaaattatttttctaaccttgttggtagccttcaagacctgactagcaaatccagccttaattttttcatgattgactaatgggtcgtattggtatttataaactttatccatatctctagatactgattctggacatagctttccgactggcgcatttggtgtgatggttcccataagtttggcagctagcagattcagtcttgaaacagcatctgcattaactagaggagacattagaatcattgctgtaaacaagtttggattatcgtaagaggctagctcccatggaatgacccaataagtagatttaatagttaccacgtgctgtaccaaagtcatcaatcatcattttttcaccattacttcttccatgtccaatatgatcatgtgagaatactaaaattcctaacgatgatatgttttcagctagttcgtcataacgtccagaatgtttaccagctccatgacttatgaatactaatgccttaggatatgtaataggtttccaatatttacaatatatgtaatcattgtccagattgaacatacagtttgcactcatgattcacgttatataactatcaatattaacagttcgtttgatgatcatattatttttatgttttattgataattgtaaaaacatacaattaaatcaatatagaggaaggagacggctactgtcttttgtgagatagtcatggcgactaaattagattatgaggatgctgttttttactttgtggatgatgataaaatatgtagtcgcgactccatcatcgatctaatagatgaatatattacgtggagaaatcatgttatagtgtttaacaaagatattaccagttgtggaagactgtacaaggaattgatgaagttcgatgatgtcgctatacggtactatggtattgataaaattaatgagattgtcgaagctatgagcgaaggagaccactacatcaattttacaaaagtccatgatcaggaaagtttattcgctaccataggaatatgtgctaaaatcactgaacattggggatacaaaaagatttcagaatctagattccaatcattgggaaacattacagatttgatgaccgacgataatataaacatcttgatactttttctagaaaaaaaattgaattgatgatataggggtcttcataacgcataattattacgttagcattctatatccgtgttaaaaaaaattatcctatcatgtatttgagagttttatatgtagcaaacatgatagctgtgatgccaataagctttagatattcacgcgtgctagtgttagggatggtattatctggtggtgaaatgtccgttatataatctacaaaacaatcatcgcatatagtatgcgatagtagagtaaacatttttatagtttttactggattcatacatcgtctacccaattcggttataaatgaaattgtcgccaatcttacacccaaccccttgttatccattagcatagtattaacttcgttatttatgtcataaactgtaaatgattttgtagatgccatatcatacatgatattcatgtccctattataatcattactaactttatcacaatatatgttgataatatctatatatgatctagtctttgtgggcaactgtctatacaagtcgtctaaacgttgtttactcatatagtatcgaacagccatcattacatggtcccgttccgttgatagataatcgagtatgttagtggacttgtcaaatctatataccatattttctggaagtggatatacatagtcgtgatcaacattattgctagcctcatcttctatatcctgtactataccattatctatatcatctacataatctatgatattattacacataaacatcgacaacatactattgtttattatctaagtcctgttgatccaaacccttgatctcctctatttgtactatctagagattgtacttcttccagttctggataatatatacgttgatagattagctgagctattctatctccagtatttacattaaacgtacattttccattattaataagaatgactcctatgtttcccctataatcttcgtctattacaccacctcctatatcaatgccttttagtgacagaccagacctaggagctattctaccatagcagaacttaggcatggacatactaatatctgtcttaattaactgtctttctcctggagggatagtataatcgtaagcgctatacaaatcatatccggcagcacccggcgattgcctagtaggagatttagctctgttagtttccttaacaaatctaactggtgagttaatattcatgttgaacataaaactaatattttatttcaaaattatttaccatcccatatattccatgaataagtgtgatgattgtacacttctatagtatctatatacgatccacgataaaatcctcctatcaatagcagtttattatccactatgatcaattctggattatccctcggataaataggatcatctatcagagtccatgtattgctggattcacaataaaattccgcatttctaccaaccaagaataaccttctaccgaacactaacgcgcatgatttataatgaggataataagtggatggtccaaactgccactgatcatgattgggtagcaaatattctgtagttgtatcagtttcagaatgtcctcccattacgtatataacattgtttatggatgccactgctggattacatctaggtttcagaagactcggcatattaacccaagcagcatccccgtggaaccaacgctcaacagatgtgggatttggtagacctcctactacgtataatttattgttagcgggtatcccgctagcatacagtctggggctattcatcggaggaattggaatccaattgtttgatatataatttaccgctatagcattgttatgtatttcattgttcatccatccaccgatgagatatactacttctccaacatgagtacttgtacacatatggaatatatctataatttgatccatgttcataggatactctatgaatggatacttgtatgatttgcgtggttgtttatcacaatgaaatattttggtacagtctagtatccattttacattatttatacctctgggagaaagataatttgacctgattacatttttgataaggagtagcagatttcctaatttatttcttcgctttatataccacttaatgacaaaatcaactacataatcctcatctggaacatttagttcatcgctttctagaataagtttcatagatagataatcaaaattgtctatgatgtcatcttccagttccaaaaagtgtttggcaataaagtttttagtatgacataagagattggatagtccgtattctatacccatcatgtaacactcgacacaatattcctttctaaaatctcgtaagataaagtttatacaagtgtagatgataaattctacagaggttaatatagaagcacgtaataaattgacgacgttatgactatctatatatacctttccagtatacgagtaaataactatagaagttaaactgtgaatgtcaaggtctagacaaaccctcgtaactggatctttatttttcgtgtatttttgacgtaaatgtgtgcgaaagtaaggagataactttttcaatatcgtagaattgactattatattgcctcctatggcatcaataattgttttgaatttcttagtcatagacaatgctaatatattcttacagtacacagtattgacaaatatcggcatttatgtttctttaaaagtcaacatctagagaaaaatgattatctttttgagacataactcccattttttggtattcacccacacgtttttcgaaaaaattagtttttccttccaatgatatattttccatgaaatcaaacggattggtaacattataaatttttttaaatcccaattcagaaatcaatctatccgcgacgaattctatatatgttttcatcatttcacaattcattcctataagtttaactggaagagccgcagtaagaaattcttgttcaatggataccgcatctgttataatagatctaacggtttcttcactcggtggatgcaataaatgtttaaacatcaaacatgcgaaatcgcagtgcagaccctcgtctctactaattagttcgttggaaaacgtgagtccgggcattaggccacgctttttaagccaaaatatggaagcgaatgatccggaaaagaagattccttctactgcagcaaaggcaataagtctctctccataaccggcgctgtcatgtatccacttttgagcccaatcggccttcttttttacacaaggcatcgtttctatggcattaaagagatagtttttttcattactatctttaacataagtatcgatcaaaagactatacatttccgaatgaatgttttcaatggccatctgaaatccgtagaaacatctagcctcggtaatctgtacttctgtacaaaatcgttccgccaaattttcattcactattccgtcactggctgcaaaaaacgccaatacatgttttataaaatatttttcgtctggtgttagtttattccaatcattgatatctttagatatatctacttcttccactgtccaaaatgatgcctctgcctttttatacatgttccagatgtcatgatattggattgggaaaataacaaatctatttggatttggtgcaaggatgggttccataactaaattaacaataacaataaattttttttcagttatctatatgcctgtacttggattttttgtacatcgatatcgccgcaatcactacaataattacaagtattattgatagcattgttattagtactatcataattaaattatctacattcatgggtgctgaataatcgttattatcatcattatcattttgtaattgtgacatcatactagataaatcgtttgcgagattgttgtgggaagcgggcatggaggatgcattatcattattatttaacgccttccatttggattcacaaatgttacgcacattcaacattttatggaaactataattttgtgaaaacaaataacaagaaaactcgtcatcgttcaaatttttaacgatagtaaaccgattaaacgtcgagctaatttctaacgctagcgactctgttggatatgggtttccagatatatatcttttcagttcccctacgtatctataatcatctgtaggaaatggaagatatttccatttatctactgttcctaatatcatatgtggtggtgtagtagaaccattaagcgcgaaagatgttatttcgcatcgtattttaacttcgcaataatttctggttagataacgcactctaccagtcaagtcaatgatattagcctttacagatatattcatagtagtcgtaacgatgactccatcttttagatgcgatactcctttgtatgtaccagaatcttcgtacctcaaactcgatatatttaaacaagttaatgagatattaacgcgttttatgaatgatgatatataaccagaagttttatcctcggtggctagcgctataaccttatcattataataccaactagtgtgattaatatgtgacacgtcagtgtgggtacaaatatgtacattatcgtctacgtcgtattcgatacatccgcatacagccaacaaatataaaatgacaaatactctaacgacgttcgtacccatcttgatgcggtttaataaatgttttgatttcaatttattgtaaaaaaagattcggttttatactgttcgatattctcattgcttatattttcatctatcatctccacacagtcaaatccgtggttagcatacacctcatcaaccggtaaaagactatcggactcttctatcattataactctagaatatttaatttggtcattattaatcaagtcaattatcttatttttaacaaacgtgagtattttactcattttttataaaaacttttagaaatatacagactctatcgtgtgtctatatcttctttttatatccaatgtatttatgtctgatttttcttcatttatcatatataatggtccaaattctacacgtgcttcggattcatccagatcattaaggttcttataattgtaacatccttctcttccctcttctacatcttccttcttattcttattcttagcgtcacagaatctaccacagcaggatcccatgacgagcgtcatattaaactaatccattttcaattataatatatgattagtaatgaccattaaaataaaaaatattcttcataaccggcaagaaagtgaaaagttcacattgaaactatgtcagtagtatacatcatgaaatgatgatatatatatactctattttggtggaggattatatgatataattcgtggataatcatttttaagacacatttctttattcgtaaatcttttcacgttaaatgagtgtccatattttgcaatttcttcatatgatggcggtgtacgtggacgaggctgctcctgttcttgttgtggtcgccgactgtcgtgtctgcgtttagatccctccattatcgcgattgcgtagatggagtactattttataccttgtaattaaatttttttattaattaaacgtataaaaacgttccgtatctgtatttaagagccagatttcgtctaatagaacaaatagctacagtaaaaataactagaataattgctacacccactagaaaccacggatcgtaatacggcaatcggttttcgataataggtggaacgtatattttatttaaggacttaacaattgtctgtaaaccacaatttgcttccgcggatcctgtattaactatctgtaaaagcatatgttgaccgggcggagccgaacattctccgatatctaatttctgtatatctataatattattaacctccgcatacgcattacagttcttttctagcttggataccgcactaggtacatcgtctagatctattcctatttcctcagcgatagctcttctatccttttccggaagcaatgaaatcacttcaataaatgattcaaccatgagtgtgaaactaagtcgagaattactcatgcatttgttagttattcggagcgcgcaatttttaaactgtcctataacctctcctatatgaatagcacaagtgacattagtagggatagaatgttgagctaatttttgtaaataactatctataaaaagattatacaaagttttaaactctttagtttccgccatttatccagtctgagaaaatgtctctcataataaatttttccaagaaactaattgggtgaagaatggaaacctttaatctatatttatcacagtctgttttggtacacatgatgaattcttccaatgccgtactaaattcgatatctttttcgatttctggatatgtttttaataaagtatgaacaaagaaatggaaatcgtaataccagttatgtttaactttgaaattgttttttattttcttgttaatgattccagccacttgggaaaagtcaaagtcgtttaatgccgatttaatacgttcattaaaaacaaactttttatcctttagatgaattattattggttcattggaatcaaaaagtaagatattatcgggtttaagatctgcgtgtaaaaagttgtcgcaacagggtagttcgtagattttaatgtataacagagccatctgtaaaaagataaactttatgtattgtaccaaagatttaaatcctaatttgatagctaactcggtatctactttatctgccgaatacagtgctaggggaaaaattataatgtttcctctttcatattcgtagttagttctcttttcatgttcgaaaaagtgaaacatgcggttaaaatagtttataacattaatattactgttaataactgccggataaaagtgggatagtaatttcacgaatttgatactgtcctttctctcgttaaacgcctttaaaaaaactttagaagaatatctcaatgagagttcctgaccatccatagtttgtatcaataatagcaacatatgaagaacacgtttatacagagtatgtaaaaatgttaatttatagtttaatcccatggcccacgcacacacgattaattttttttcatctccctttagattgttgtatagaaatttgggtactgtgaactccgccgtagtttccatgggactatataattttgtggcctcgaatacaaattttactacatagttatctatcttaaagactataccatatcctcctgtagatatgtgataaaaatcgtcgtttataggataaaatcgtttatccttttgttggaaaaaggatgaattaatgtaatcattctcttctatctttagtagtgtttccttattaaaattcttaaaataatttaacaatctaactgacggagcccaattttggtgtaaatctaattgggacattatattgttaaaatacaaacagtctcctaatataacagtatctgataatctatggggagacatccattgatattcaggggatgaatcattggcaacacccatttattgtacaaaaagccccaatttacaaacgaaagtccaggtttgatagagacaaacaattaactattttgtctctgtttttaacacctccacagtttttaatttctttagtaatgaaattattcacaatatcagtatcttctttatctaccagagattttactaacttgataaccttggctgtctcattcaatagggtagtaatatttgtatgtgtgatattgatatctttttgaattgtttcttttagaagtgattctttgatggtgccagcatacgaattacaataatgcagaaactcggttaacatgcaggaattatagtaagccaattccaattgttgcctgtgttgtattagagtgtcaatatgagcaatggtgtccttgcgtttctctgatagaatgcgagcagcgattttggcgttatcatttgacgatatttctggaatgacgaatcctgtttctactaactttttggtaggacaaagtgaaacaatcaagaagatagcttctcctcctatttgtggaagaaattgaactcctctagatgatctactgacgatagtatctccttgacagatattggaccgaattacagaagtacctggaatgtaaagccctgaaaccccctcattttttaagcagattgttgccgtaaatcctgcactatgcccaagatagagagctcctttggtgaatccatctctatgtttcagtttaaccaagaaacagtcagctggtctaaaatttccatctctatctaatacagcatctaacttgatgtcaggaactatgaccggtttaatgttatatgtaacattgagtaaatccttaagttcataatcatcactgtcatcagttatgtacgatccaaacaatgtttctaccggcatagtggatacgaagatgctatccatcagaatgtttccctgattagtattttctatatagctattcttctttaaacgattttccaaatcagtaactatgttcatttttttaggagtaggacgcctagccagtatggaagaggattttctagatcctctcttcaacatctttgatctcgatggaatgcaaaaccccatagtgaaacaaccaacgataaaaataatattgtttttcactttttataattttaccatctgactcatggattcattaatatctttataagagctactaacgtataattctttataactgaactgagatatatacaccggatctatggtttccataattgagtaaatgaatgctcggcaataactaatggcaaatgtatagaacaacgaaattatactagagttgttaaagttaatattttctatgagctgttccaataaattatttgttgtgactgcgttcaagtcataaatcatcttgatactatccagtaaaccgtttttaagttctggaatattatcatcccattgtaaagcccctaattcgactatcgaatatcctgctctgatagcagtttcaatatcgacggacgtcaatactgtaataaaggtggtagtattgtcatcatcgtgataaactacgggaatatggtcgttagtaggtacggtaactttacacaacgcgatatataactttccttttgtaccatttttaacgtagttgggacgtcctgcagggtattgttttgaagaaatgatatcgagaacagatttgatacgatatttgttggattcctgattattcactataatataatctagacagatagatgattcgataaatagagaaggtatatcgttggtaggataatacatccccattccagtattctcggatactctattgatgacactagttaagaacatgtcttctattctagaaaacgaaaacatcctacatggactcattaaaacttctaacgctcctgattgtgtctcgaatgcctcgtacaaggatttcaaggatgccatagattctttgaccaacgatttagaattgcgtttagcatctgatttttttattaaatcgaatggtcggctctctggtttgctaccccaatgataacaatagtcttgtaaagataaaccgcaagaaaatttatacgcatccatccaaataaccctagcaccatcggatgatattaatgtattattatagattttccatccacaattattgggccagtatactgttagcaacggtatatcgaatagattactcatgtaacctactagaatgatagttcgtgtactagtcataatatctttaatccaatctaaaaaatttaaaattagattttttacactgttaaagttaacaaaagtattacccgggtacgtggatatcatatatggcattggtccattatcagtaatagctccataaactgatacggcgatggtttttatatgtgtttgatctaacgaggaagaaattcgcgcccacaattcatctctagatatgtatttaatatcaaacggtaacacatcaatttcgggacgcgtatatgtttctaaatttttaatccaaatataatgatgacctatatgccctattatcatactgtcaactatagtacacctagggaacttacgatacatctgtttcctataatcgttaaattttacaaatctataacatgctaaaccttttgacgacagccattcattaatttctgatatggaatctgtattctcgataccgtatcgttctaaagccagtgctatatctccctgttcgtgggaacgctttcgtataatatcgatcaacggataatctgaagtttttggagaataatatgactcatgatctatttcgtccataaacaatctagacataggaattggaggcgatgatcttaattttgtgcaatgagtcgtcaatcctataacttctaatcttgtaatattcatcatcgacataatactatctatgttatcatcgtatattagtataccatgaccttcttcatttcgtgccaaaatgatatacagtcttaaatagttacgcaatatctcaatagtttcataattgttagctgttttcatcaaggtttgtatcctgtttaacatgatggcgttctataacgtctctattttctatttttaattttttaaatttttaacgatttactgtggctagatacccaatctctctcaaatatttttttagcctcgcttacaagctgtttatctatactattaaaactgacgaatccgtgattttggtaatgggttccgtcgaaatttgccgaagtgatatgaacatattcgtcgtcgactatcaacaattttgtattattctgaatagtgaaaaccttcacagatagatcattttgaacacacaacgcatctagacttttggcggttgccatagaatatacgtcgttcttatcccaattaccaactagaagtctgatcttaactcctctattaatggctgcttctataatggagttgtaaatgtcgggccaatagtagctattaccgtcgacacgtgtagtgggaactatggccaaatgttcaatatctatactagtcttagctgacctgagtttatcaataactacatcggtatctagatctctagaatatcccaataggtgttccggagaatcagtaaagaacactccacctataggattcttaatatgatacgcagtgctaactggcaaacaacaagccgcagagcataaattcaaccatgaattttttgcgctattaaaggctttaaaagtatcaaatcttctacgaagatctgtggccagcgggggataatcagaatatacacctaacgttttaatcgtatgtatagatcctccagtaaatgacgcgtttcctacataacatctttcatcatctgacacccaaaaacaaccgagtagtagtcccacattattttttttatctatattaacggttataaaatttatatccgggcagtgactttgtagctctcccagatttcttttccctcgttcatctagcaaaactattattttaatccctttttcagatgcctcttttagtttatcaaaaataagcgctcccctagtcgtactcagaggattacaacaaaaagatgctatgtatatatatttcttagctagagtgataatttcgttaaaacattcaaatgttgttaaatgatcggatctaaaatccatattttctggtagtgtttctaccagcctacattttgctcccgcaggtaccgatgcaaatggccacatttagttaacataaaaacttatacatcctgttctatcaacgattctagaatatcatcggctatatcgctaaaattttcatcaaagtcgacatcacaacctaactcagtcaatatattaagaagttccatgatgtcatcttcgtctatttctatatccgtatccattgtagattgttgaccgattatcgagtttaaatcattactaatactcaatccttcagaatacaatctgtgtttcattgtaaatttataggcggtgtatttaagttggtagattttcaattatgtattaatatagcaacagtagttcttgctcctccttgattctagcatcctcttcattattttcttctacgtacataaacatgtccaatacgttagacaacacaccgacgatggcggccgctacagacacgaatatgactaaaccgatgaccatttaaaaacccctctctagctttcacttaaactgtatcgatcattcttttagcacatgtataatataaaaacattattctatttcgaatttaggcttccaaaaatttttcatccgtaaaccgataataatatatatagacttgttaatagtcggaataaatagattaatgcttaaactatcatcatctccacgattagagatacaatatttacattctttttgctgtttcgaaactttatcaatacacgttaatacaaacccaggaaggagatattgaaactgaggctgttgaaaatgaaacggtgaatacaataattcagataatgtaaaatcatgattccgtattctgatgatattagaactgctaatggatgtcgatggtatgtatctaggagtatctattttaacaaagcatcgatttgctaatatacaattatccttttgattaattgttattttattcatattcttaaaaggtttcatatttatcaattcttctacattaaaaatttccatttttaatttatgtagccccgcaatactcctcattacgtttcattttttgtctataatatccattttgttcatctcggtacatagattatccaattgagaagcgcatttagtagttttgtacattttaagtttattgacgaatcgtcgaaaactagttatagttaacattttattatttgataccctgatattaatacccctgccgttactattatttataactgatgtaatccacgtaacattggaattaactatcgatagtaatgcatcgacgcttccaaaattgtctattataaactcaccgataatttttttattgcatgttttcatattcattaggattatcaaatctttaatcttattacgattgtatgcgttgatattacaagacgtcattctaaaagacggaggatctccatcaaatgccagacaatcacgtacaaagtacatggaaataggttttgttctattgcgcatcatagatttatatagaacacccgtagaaatactaatttgttttactctataaaatactaatgcatctatttcatcgttttgtataacgtctttccaagtgtcaaattccaaatttttttcattgatagtaccaaattcttctatctctttaactacttgcatagataggtaattacagtgatgcctacatgccgttttttgaaactgaatagatgcgtctagaagcgatgctacgctagtcacaatcaccactttcatatttagaatatatatatgtaaaaatatagtagaatttcattttgtttttttctatgctataaatgaattctcattttgcatctgctcatactccgttttatattaataccaaagaaggaagatatctggttctaaaagccgttaaagtatgcgatgttagaactgtagaatgcgaaggaagtaaagcttcctgcgtactcaaagtagataaaccctcatcgcccgcgtgtgagagaagaccttcgtccccgtccagatgcgagagaatgaataaccctggaaaacaagttccgtttatgaggacggacatgctacaaaatatgttcgcggctaatcgcgataatgtagcttctagacttttgtcctaaaatactattatatccttttcgatattaataaatccgtgtcgtccaggttttttatctctttcagtatgtgaatagataggtattttatctctattcatcatcgaatttaagagatccgataaacattgtttgtattctccagatgtcagcatctgatacaacaatatatgtgcacataaacctctggcacttatttcatgtaccttccccttatcactaaggagaatagtatttgagaaatatgtatacatgatattatcatgaattagatatacagaatttgtaacactctcgaaatcacacgatgtgtcggcgttaagatctaatatatcactcgataacacattttcatctagatacactagacattttttaaagctaaaatagtctttagtagtaacagtaactatgcgattattttcatcgatgatacatttcatcggcatattattacgcttaccatcaaagactataccatgtgtatatctaacgtattctagcatggttgccatacgcgcattaaacttttcaggatctttggatagatcttccaatctatctatttgagaaaacatttttatcatgttcaatagttgaaacgtcggatccactatatagatattatctataaagattttaggaactacgttcatggtatcctggcgaatattaaaactatcaatgatatgattatcgttttcatcttttatcaccatatagtttctaagatatgggattttacttaatataatattatttcccgtgataaattttattagaaaggccaaatctataagaaaagtcctagaattagtctgaagaatatctatatcgccgtatagtatatttggattaattagatatagagaatatgatccgtaacatatacaacttttattatggcgtctaagatattcttccatcaacttattaacatttttgactagggaagatacattatgacgtcccattacttttgccttgtctattactgcgacgttcatagaatttagcatatctcttgccaattcttccattgatgttacattataagaaattttagatgaaattacatttggagctttaatagtaagaactcctaatatgtccgtgtatgtggtcactaatacagattgtagttctataatcgtaaataatttacctatattatatgtttgagtctgtttagaaaagtagctaagtatacgatcttttatttctgatgcagatgtattaacatcggaaaaaaatctttttttattcttttttactaaagatacaaatatgtctttgttaaaaacagttattttctgaatatttctagcttgtaattttaacatatgatattcgttcacactaggtactctgcctaaataggtttctataatctttaatgtaatattaggaaaagtattctgatcaggattcctattcattttgaggatttaaaactctgattattgtctaatatggtctctacgcaaactttttcacagagcgatagagtttttgataactcgtttttcttaagaaatataaaactactgtctccagagctcgctctatcttttattttatctaattcgatacaaactcctgatactggttcagaaagtaattcattaattttcagtcctttatagaagatatttaatatagataatacaaaatcttcagtttttgatatcgatctgattgatcctagaactagatatattaataacgtgctcattaggcagtttatggcagcttgataattagatatagtatattccagttcatatttattagataccgcattgcccagattttgatattctatgaattcctctgaaaataaatccaaaataactagacattctattttttgtggattagtgtactctcttccctctatcatgttcactactggtgtccacgatgataaatatctagagggaatataatatagtccataggatgccaatctagcaatgtcgaataactgtaattttattcttcgctcttcattatgaattgattcttgaggtataaacctaacacaaattatattattagacttttcgtatgtaatgtctttcatgttataagtttttaatcctggaatagaatctattttaatgaggcttttaaacgcagagttctccaacgagtcaaagcataatactctgttgtttttcttatatacgatgttacgattttcttctttgaatggaataggtttttgaattagtttataattacaacataatagataaggaagtgtgcaaatagtacgcggaaaaaacataatagctcccctgttttcatccatggttttaagtaaatgatcactggcttctttagtcaatggatattcgaacattaaccgtttcatcatcattggacagaatccatatttcttaatgtaaagagtgatcaaatcattgtgtttattgtaccatcttgttgtaaatgtgtattcggttatcggatctgctcctttttctattaaagtatcgatgtcaatctcgtctaagaattcaactatatcgacatatttcatttgtatacacataaccattactaacgtagaatgtataggaagagatgtaacgggaacagggtttgttgattcgcaaactattctaatacataattcttctgttaatacgtcttgcacgtaatctattatagatgccaagatatctatataattattttgtaagatgatgttaactatgtgatctatataagtagtgtaataattcatgtattttgatatatgttccaactctgtctttgtgatgtctagtttcgtaatatctatagcatcctcaaaaaatatattcgcatatattcccaagtcttcagttctatcttctaaaaaatcttcaacgtatggaatataataatctattttacctcttctgatatcattaatgatatagtttttgacactatcttctgtcaattgattcttattcactatatctaagaaacggatagcgtccctaggacgaactactgccattaatatctctattatagcttctggacataattcatctattataccagaattaatgggaactattccgtatctatctaacatagttttaagaaagtcagaatctaagacctgatgttcatatattggttcatacatgaaatgatctctattgatgatagtgactatttcattctctgaaaattggtaactcattctatatatgctttccttgttgatgaaggatagaatatactcaatagaatttgtaccaacaaactgttctcttatgaatcgtatatcatcatctgaaataatcatgtaaggcatacatttaacaattagagacttgtctcctgttatcaatatactattcttgtgataatttatgtgtgaggcaaatttgtccacgttctttaattttgttatagtagatatcaaatccaatggagctacagttcttggcttaaacagatatagtttttctggaacaaattctacaacattattataaaggactttgggtaaataagtgggatgaaatcctattttaattaatgcgatagccttgtcctcgtgcagatatccaaacgcttttgtgatagtatggcattcattgtctagaaacgctctacgaatatctgtgacagatatcatctttagagaatatactagtcgcgttaatagtactacaatttgtattttttaatctatctcaataaaaaaattaatatgtatgattcaatgtataactaaactactaactgttattgataactagaatcagaatctaatgatgacgtacccaagaagtttatctactgccaatttagctgcattatttttagcatctcgtttagattttccatctgccttatcgaatactcttccgtcgatatctacacaggcataaaatgtaggagagttactaggcccaactgattcaatacgaaaagaccaatctctcttagttatttggcagtactcattaataacggtgacagggttagcatctttccaatcaataatttttttagccggaataacatcatcaaaagacttatgatcctctctcattgatttttcgcgggatacatcatctattatgacgtcagccataacatcagcatccggcttatccgcctccgttgtcataaaccaacgaggaggaatatcgtcggagctgtacaccatagcactacgttgaagatcgtacagagctttattaacttctcgcttctccatattaagttgtctagttagttgtgcagcagtagctccttcgattccaatggttttaatagcctcacacacaatctctgcgttagaacgttcgtcgatatagattttagacatttttagagagaactaacacaaccagcaataaaactgaacctactttatcatttttttattcatcatcctctggtggttcgtcgttcctatcaaatgtagctctgattaacccgtcatctataggtgatgctggttctggagattctggaggagatggattattatctggaagaatctctgttatttccttgttttcatgtatcgattgcgttgtaacattaagattgcgaaatgctctaaatttgggaggcttaaagtgttgtttgcaatctctacacgcgtgtctaactagtggaggttcgtcagctgctctagtttgaatcatcatcggcgtagtattcctacttttacagttaggacacggtgtattgtatttctcgtcgagaacgttaaaataatcgttgtaactcacatcctttattttatctatattgtattctactcctttcttaatgcattttataccgaataagagatagcgaaggaattctttttcggtgccgctagtacccttaatcatatcacatagtgttttatattccaaatttgtggcaatagacggtttatttctatacgatagtttgtttctggaatcctttgagtattctataccaatattattctttgattcgaatttagtttcttcgatattagattttgtattacctatattcttgatgtagtactttgatgatttttccatggcccattctattaagtcttccaagttggcatcatccacatattgtgatagtaattctcggatatcagtagcggctaccgccattgatgtttgttcattggatgagtaactactaatgtatacattttccatttataacacttatgtattaactttgttcatttatattttttcattattatgttgatattaacaaaagtgaatatatatatatgttaataattgtattgtggttatacggctacaattttataatgagtgaaagtcagtgtccgatgatcaatgacgatagctttactctgaaaagaaagtatcaaatcgatagtgcggagtcaacaataaaaatggataagaagaggataaagtttcagaatagagccaaaatggtaaaagaaataaatcagacaataagagcagcacaaactcattacgagacattgaaactaggatacataaaatttaagagaatgattaggactactactctagaagatatagcaccatctattccaaataatcagaaaacttataaactattctcggacatttcagccatcggcaaagcatcacagaatccgagtaagatggtatatgctctgctgctttacatgtttcccaatttgtttggagatgatcatagattcattcgttatagaatgcatccaatgagtaaaatcaaacacaagatcttctctcctttcaaacttaatcttattagaatattagtggaagaaagattctataataatgaatgcagatctaataaatggaaaataattggaacacaagttgataaaatgttgatagctgaatctgataaatatacaatagatgcaaggtataacctaaaacccatgtatagaatcaagggagaatctgaagaagataccctcttcatcaaacagatggtagaacaatgtgtgacatcccaggaattggtggaaaaagtgttgaagatactgtttagagatttgttcaagagtggagaatacaaagcgtacagatacgatgatgatgtagaaaatggattcattggattggatacactaaaattaaacattgttcatgatatagttgaaccatgtatgcctgttcgtaggccagtggctaagatactgtgtaaagaaatggtaaataaatactttgagaatccgctacatattattggtaaaaatcttcaagagtgcattgactttgttagtgaataggcatttcatctttctccaatactaattcaaattgttaaattaataatggatagtataaatagttattagttataagatagtaaaaataattattagaataagagtgtagtatcatagataactctcttctataaaaatggattttattcgtagaaagtatcttatatacacagtagaaaataatatagattttttaaaggatgatacattaagtaaagtaaacaattttaccctcaatcatgtactagctctcaagtatctagttagcaattttcctcaacatgttattactaaggatgtattagctaataccaatttttttgttttcatacatatggtacgatgttgtaaagtgtacgaagcggttttacgacacgcatttgatgcacccacgttgtacgttaaagcattgactaagaattatttatcgtttagtaacgcaatacaatcgtacaaggaaaccgtgcataaactaacacaagatgaaaaatttttagaggttgccgaatacatggacgaattaggagaacttataggcgtaaattatgacttagttcttaatccattatttcacggaggggaacccatcaaagatatggaaatcatttttttaaaactgtttaagaaaacagacttcaaagttgttaaaaaattaagtgttataagattacttatttgggcatacctaagcaagaaagatacaggcatagagtttgcggataatgatagacaagatatatatactctatttcaacaaactggtagaatcgtccatagcaatctaacagaaacgtttagagattatatctttcccggagataagactagctattgggtgtggttaaacgaaagtatagctaatgatgcggatatcgttcttaatagacccgccattaccatgtatgataaaattcttagttatatatactctgagataaaacaaggacgcgttaataaaaacatgcttaagttagtttatatctttgagcctgaaaaagatatcagagaacttctgctagaaatcatatatgatattcctggagatatcctatctattattgatgcaaaaaacgacgattggaaaaaatattttattagtttttataaagctaattttattaacggtaatacatttattagtgatagaacgtttaacgaggacttattcagagttgttgttcaaatagatcccgaatatttcgataatgaacgaattatgtctttattctctacgagtgctgcggacattaaacgatttgatgagttagatattaataacagttatatatctaatataatttatgaggtgaacgatatcacattagatacaatggatgatatgaagaagtgtcaaatctttaacgaggatacgtcgtattatgttaaggaatacaatacatacctgtttttgcacgagtcggatcccatggtcatagagaacggaatactaaagaaactgtcatctataaaatccaagagtagacggctgaacttgtttagcaaaaacattttaaaatattatttagacggacaattggctcgtctaggtcttgtgttagatgattataaaggagacttgttagttaaaatgataaaccatcttaagtctgtggaggatgtatccgcattcgttcgattttctacagataaaaaccctagtattcttccatcgctaatcaaaactattttagctagttataatatttccatcatcgtcttatttcaaaggtttttgagagataatctatatcatgtagaagaattcttggataaaagcatccatctaaccaagacggataagaaatatatacttcaattgataagacacggtagatcatagaacagaccaaatatattattaataatttgtatatacatagatataattatcacacatttttgataaatgggaactgctgcaacaattcagactcccaccaaattaatgaataaagaaaatgcagaaatgattttggaaaaaattgttgatcatatagttatgtatattagtgacgaatcaagtgattcagaaaataatcctgaatatattgattttcgtaacagatacgaagactatagatctctcattataaaaagtgatcacgagtttgtaaagctatgtaaaaatcatgcggagaaaagttctccagaaacgcaacaaatgattatcaaacacatatacgaacaatatcttattccagtatctgaagtactattaaaacctataatgtccatgggtgacataattacatataacggatgtaaagacaatgaatggatgctagaacaactctctaccctaaactttaacaatctccgcacatggaactcatgtagcataggcaatgtaacgcgtctgttttatacattttttagttatctgatgaaagataaactaaatatataagtataatcccattctaatactttaacctgatgtattagcatcttattagaatattaacctaactaaaagacataacataaaaactcattacatagttgataaaaagcggtaggatataaatattatggctgccaccgttccgcgttttgacgacgtgtacaaaaatgcacaaagaagaattctagatcaagaaacattttttagtagaggtctaagtagaccgttaatgaaaaacacatatctatttgataattacgcgtatggatggataccagaaactgcaatttggagtagtagatacgcaaacttagatgcaagtgactattatcccatttcgttgggattacttaaaaagttcgagtttctcatgtctctatataaaggtcctattccagtatacgaagaaaaagtaaatactgaattcattgctaatggatctttctccggtagatacgtatcatatcttagaaagttttctgctcttccaacaaacgagtttattagttttttgttactgacttccattccaatctataatatcttgttctggtttaaaaatactcagtttgatattactaaacacacattattcagatacgtctatacagataatgccaaacacctggcgttggctaggtatatgtatcaaacaggagactataagcctttgtttagtcgtctcaaagagaattatatatttaccggtcccgttccaatatgtatcaaagatatagatcaccctaatcttagtagagcaagaagtccatccgattatgagacattagctaatattagtactatattgtactttaccaagtatgatccggtattaatgtttttattgttttacgtacctgggtattcaattactacaaaaattactccagccgtagaatatctaatggataaactgaatctaacaaagagcgacgtacaactgttgtaaattattttatgcttcgtaaaatgtaggttttgaaccaaacattctttcaaagaatgagatgcataaaactttattatccaatagattgactatttcggacgtcaatcgtttaaagtaaacttcgtaaaatattctttgatcactgccgagtttaaaacttctatcgataattgtttcatatgttttaatatttacaagttttttggtccatggtccattaggacaaatatatgcaaaataatatcgttctccaagttctatagtctctggattatttttattatattcagtaaccaaatacatattagggttatctgcggatttataatttgagtgatgcattcgactcaacataaataattctagaggagacgatctactatcaaattcggatcgtaaatctgtttctaaagaacggagaatatctatacatacctgattagaattcatccgtccttcagacaacatctcagacagtctggttttgtacatcttaatcatattcttatgaaacttggaaacatctcttctagtttcactagtacctttattaattctctcaggtacagattttgaattcgacgatgctgagtatttcatcgttgtatatttcttcttcgattgcataatcagattcttatataccgcctcaaactctattttaaaattattaaacaatactctattattaatcagtcgttctaactctttcgctatttctatagacttatctacatcttgactgtctatctctgtaaacacggagtcggtatctccatacacgctacgaaaacgaaatctgtaatctataggcaacgatgttttcacaatcggattaatatctctatcgtccatataaaatggattacttaatggattggcaaaccgtaacataccgttagataactctgctccatttagtaccgattctagatacaagatcattctacgtcctatggatgtgcaactcttagccgaagcgtatgagtatagagcactatttctaaatcccatcagaccatatactgagttggctactatcttgtacgtatattgcatggaatcatagatggccttttcagttgaactggtagcctgttttagcatctttttatatctggctctctctgccaaaaatgttcttaatagtctaggaatggttccttctatcgatctatcgaaaattgctatttcagagatgaggttcggtagtctaggttcacaatgaaccgtaatatatctaggaggtggatatttctgaagcaatagctgattatttatttcttcttccaatctattggtactaacaacgacaccgactaatgtttccggagatagatttccaaagatacacacattaggatacagactgttataatcaaagattaatacattattactaaacattttttgttttggagcaaataccttaccgccttcataaggaaacttttgttttgtttctgatctaactaagatagttttagtttccaacaatagctttaacagtggacccttgatgactgtactcgctctatattcgaataccatggattgaggaagcacatatgttgacgcacccgcgtctgtttttgtttctactccataatactcccacaaatactgacacaaacaagcatcatgaatacagtatctagccatatctaaagctatgtttagattataatccttatacatctgagctaaatcaacgtcatcctttccgaaagataatttatatgtatcattaggtaaagtaggacataatagtacgactttaaatccattttcccaaatatctttacgaattactttacatataatatcctcatcaacagtcacataattacctgtggttaaaacctttgcaaatgcagcggctttgcctttcgcgtccgtagtatcgtcaccgatgaacgtcatttctctaactcctttatttaatactttacccatgcaactgaacgcgttcttggatatagaatccaatttgtacgaatccaatttttcaaatttttgaatgaatgaatatagatcgaaaaatatagttccattattgttattaacgtgaaacgtagtattggccatgccgcctactcccttatgactagactgatttctctcataaatacagagatgtacagcttcctttttgtccggagatctaaagataatcttctctcctgttaataactctagacgattagtaatatatctcagatcaaagttatgtccgttaaaggtaacgacatagtcgaacgttagttccaacaattgtttagctattcgtaacaaaactatttcagaacataaaactagttctcgttcgtaatccatttccattagtgactgtatcctcaaacatcctctatcgacggcttcttgtatttcctgttccgttaacatctcttcattaatgagcgtaaacaataatcgtttaccacttaaatcgatataacagtaacttgtatgcgagattgggttaataaatacagaaggaaacttcttatcgaagtgacactctatatctagaaataagtacgatcttgggatatcgaatctaggtatttttttagcgaaacagttacgtggatcgtcacaatgataacatccattgttaatctttgtcaaatattgctcgtccaacgagtaacatccgtctggagatatcccgttagaaatataaaaccaactaatattgagaaattcatccatggtggcattttgtatgctgcgtttctttggctcttctatcaaccacatatctgcgacggagcattttctatctttaatatctagattataacttattgtctcgtcaatgtctatagttctcatctttcccaacggcctcgcattaaatggaggaggagacaatgactgatatatttcgtccgtcactacgtaataaaagtaatgaggaaatcgtataaatacggtctcaccatttcgacatctggatttcagatataaaaatctgttttcaccgtgactttcaaaccaattaatgcaccgaacatccatttatagaatttagaaatatattttcatttaaatgaatcccaaacattggggaagagccgtatggaccattatttttatagtactttcgcaagcgggtttagacggcaacatagaagcgtgtaaacgaaaactatatactatagttagcactcttccatgtcctgcatgtagacggcacgcgactatcgctatagaggacaataatgtcatgtctagcgatgatctgaattatatttattattttttcatcagattatttaacaatttggcatctgatcccaaatacgcgatcgatgtgacaaaggttaaccctttataaacttaacccattataaaacttatgattagtcacaactgaaataaccgcgtgattattttttggtataattctacacggcatggtttctgtgactatgaattcaacccccgttacattagtgaaatctttaacaaacagcaagggttcgtcaaagacataaaactcattgtttacaatcgaaatagaccccctatcacacttaaaataaaaaatatccttatcctttaccaccaaataaaattctgattggtcaatgtgaatgtattcacttaacagttccacaaatttatttattaactccgaggcacatacatcgtcggtattttttatggcaaactttactcttccagcatccgtttctaaaaaaatattaacgagttccatttatatcatccaatattattgaaatgacgttgatggacagatgatacaaataagaaggtacggtacctttgtccaccatctcctccaattcatgctctattttgtcattaactttaatgtatgaaaacagtacgccacatgcttccatgacagtgtgtaacactttggatacaaaatgtttgacattagtataattgttcaagactgtcaatctataatagatagtagctataatatattctatgatggtattgaagaagatgacaaccttggcatattgatcatttaacacagacatggtatcaacagatagcttgaatgaaagagaatcagtaattggaataagcgtcttctcgatagagtgtccgtataccaacatgtctgatattttgatgtattccattaaattatttagttttttctttttattctcgttaaacagcatttctgtcaacggaccccaacatcgttgaccgattaagttttgattgatttttccgtgtaaggcgtatctagtcagatcgtatagcctatccaataatccatcatctgtgcgtagatcacatcgtacactttttaattctctatagaagagcgacagacatctggagcaattacagacagcaatttctttattctctacagatgtaagatacttgaagacattcctatgatgatgcagaattttggataacacggtattgatggtatctgttaccataattcctttgatggctgatagtgtcagagcacaagatttccaatctttgacaatttttagcaccattatctttgttttgatatctatatcagacagcatggtgcgtctgacaacacagggattaagacggaaagatgaaatgattctctcaacatcttcaatagataccttgctattttttctggcattatctatatgtgcgagaatatcctctagagaatcagtatcctttttgatgatagtggatctcaatgacatgggacgtttaaaccttcttattctatcaccagattgcatggtgatttgtcttctttcttttatcataatgtaatctctaaattcatcggcaaattgtctatatctaaaatcataatatgagatgtttacctctacaaatatctgttcgtccaatgttagagtatttacatcagttttgtattccaaattaaacatggcaacggatttaattttatattcctctattaagtcctcgtcgataataacagaatgtagataatcatttaatccatcgtacatggttggaagatgcttgttgacaaaatctttaattgtcttgatgaaggtgggactatatctaacatcttgattaataaaatttataacattgtccataggatactttgtaactagttttatacacatctcttcatcggtaagtttagacagaatatcgtgaacaggtggtatattatattcatcagatatacgaagaacaatgtccaaatctatattgtttaatatattatatagatgtagcgtagctcctacaggaatatctttaactaagtcaatgatttcatcaaccgttagatctattttaaagttaatcatataggcattgatttttaaaaggtatgtagccttgactacattctcattaattaaccattccaagtcactgtgtgtaagaagattatattctatcataagcttgactacatttggtcccgataccattaaagaattcttatgatataaggaaacagcttttaggtactcatctactctacaagaattttggagagccttaacgatatcagtgacgtttattatttcaggaggaaaaaacctaacattgagaatatcggaattaatagcttccagatacagtgattttggcaatagtccgtgtaatccataatccagtaacacgagctggtgcttgctagacaccttttcaatgtttaatttttttgaaataagctttgataaagccttcctcgcaaattccggatacatgaacatgtcggcgacatgattaagtattgttttttcattattttctcaataccccaatagatgatagaatatcacccaatgcgtccatgttgtctatttccaacaggtcgctatatccaccaatagaagtttttccaaaaaagattctaggaacagttctaccaccagtaatttgttcaaaatagtcacgcaattcattttcgggtttaaattctttaatatcgacaatttcatacgctcctcttttgaaactaaacttatttagaatatccagtgcatttctacaaaaaggacatgtatacttgacaaaaattgtcactttgttattggccaacctttgttgtacaaattcctcggccattttaatatttaagtgatataaaactatctcgacttatttaactctttagtcgagatatatggacgcagatagctatatgatagccaactacagaaggcaaacgctataaaaaacataattacgacgagcatatttataaatatttttattcagcattacttgatatagtaatattaggcacagtcaaacattcaaccactctcgatacattaactctctcattttctttaacaaattctgcaatatcttcgtaaaaagattcttgaaactttttagaatatctatcgactctagatgaaatagcgttcgtcaacatactatgttttgtatacataaaggcgcccattttaacagtttctagtgacaaaatgctagcgatcctaggatcctttagaatcacatagattgacgattcgtctctcttagtaactctagtaaaataatcatacaatctagtacgcgaaataatattatccttgacttgaggagatctaaacaatctagttttgagaacatcgataagttcatcgggaatgacatacatactatctttaatagaactcttttcatccagttgaatggattcgtccttaaccaactgattaatgagatcttctattttatcattttccagatgatatgtatgtccattaaagttaaattgtgtagcgcttctttttagtctagcagccaatactttaacatcactaatatcgatatacaaaggagatgatttatctatggtattaagaattcgtttttcgacatccgtcaaaaccaattcctttttgcctgtatcatccagttttccatcctttgtaaagaaattattttctactagactattaataagactgataaggattcctccataattgcacaatccaaactttttcacaaaactagactttacaagatctacaggaatgcgtacttcaggttttttagcttgtgattttttcttttgcggacattttcttgtgaccaactcatctaccatttcattgattttagcagtgaaataagctttcaatgcacgggcactgatactattgaaaacgagttgatcttcaaattccgccatttaagttcaccaaacaacttttaaatacaaatatatcaatagtagtagaataagaactataaaaaaaataataattaaccaataccaaccccaacaaccggtattattagttgatgtgactgttttctcatcacttagaacagatttaacaatttctataaagtctgtcaaatcatcttccggagaccccataaatacaccaaatatagcggcgtacaacttatccatttatacattgaatattggcttttctttatcgctatcttcatcatattcatcatcaatatcaacaagtcccagattacgagccagatcttcttctacattttcagtcattgatacacgttcactatctccagagagtccgataacgttagccaccacttctctatcaatgattagtttcttgagcgcgaaagtaatttttgtttccgttccggatctatagaagacgataggtgtgataattgccttggccaattgtctttctcttttactgagtgattctagttcaccttctatagatctgagaatggatgattctccagtcgaaacatattctaccatggatccgtttaatttgttgatgaagatggattcatccttaaatgttttctctgtaatagtttccaccgaaagactatgcaaagaatttggaatgcgttccttgtgcttaatgtttccatagacggcttctagaagttgatacaacataggactagccgcggtaacttttatttttagaaagtatccatcgcttctatcttgtttagatttatttttataaagtttagtctctccttccaacataataaaagtggaagtcatttgactagataaactatcagtaagttttatagagatagacgaacaattagcgtattgagaagcatttagtgtaacgtattcgatacattttgcattagatttactaatcgattttgcatactctataacacccgcacaagtctgtagagaatcgctagatgcagtaggtcttggtgaagtttcaactctcttcttgattaccttactcatgattaaacctaaataattgtactttgtaatataatgatatatattttcactttatctcatttgagaataaaaatgtttttgtttaaccactgcatgatgtacagatttcggaatcgcaaaccaccagtggttttattttatccttgtccaatgtgaattgaatgggagcggatgcgggtttcgtacgtagatagtacattcccgtttttagaccgagactccatccgtaaaaatgcatactcgttagtttggaataactcggatctgctatatggatattcatagattgactttgatcgatgaaggctcccctgtctgcagccatttttatgatcgtcttttgtggaatttcccaaatagttttataaactcgcttaatatcttctggaaggtttgtattctgaatggatccaccatctgccataatcctattcttgatctcatcattccataattttctctcggttaaaactctaaggagatgcggattaactacttgaaattctccagacaatactctccgagtgtaaatattactggtatacggttccaccgactcattatttcccaaaatttgagcagttgatgcagtcggcataggtgccaccaataaactatttctaagaccgtatgttctgattttatcttttagaggttcccaattccaaagatccgacggtacaacattccaaagatcatattgtagaataccgttactggcgtacgatcctacatatgtatcgtatggtccttccttctcagctagttcacaactcgcctctaatgcaccgtaataaatggtttcgaagatcttcttatttagatcttgtgcttccaggctatcaaatggataatttaagagaataaacgcgtccgctaatccttgaacaccaataccgataggtctatgtctcttattagagatttcagcttctggaataggataataattaatatctataattttattgagatttctgacaattactttgaccacatccttcagtttgagaaaatcaaatcgcccatctattacaaacatgttcaaggcaacagatgccagattacaaacggctacctcattagcatccgcatattgtattatctcagtgcaaagattactacacttgatagttcctaaattttgttgattactctttttgttacacgcatccttataaagaatgaatggagtaccagtttcaatctgagattctataatcgctttccagacgactcgagcctttattatagatttgtatctcctttctctttcgtatagtgtatacaatcgttcgaactcgtctccccaaacattgtccaatccaggacattcatccggacacatcaacgaccactctccgtcatccttcactcgtttcataaagagatcaggaatccaaagagctataaatagatctctggttctatgttcctcgtttcctgtattctttttaagatcgaggaacgccataatatcagaatgccacggttccaagtatatggccataactccaggccgtttgtttcctccctgatctatgtatctagcggtgttattataaactctcaacattggaataataccgtttgatataccattggtaccggagatatagcttccactggcacgaatattactaattgatagacctattccccctgccattttagagattaatgcgcatcgttttaacgtgtcatagataccctctatgctatcatcgatcatgttaagtagaaaacagctagacatttggtgacgactagttcccgcattaaataaggtaggagaagcgtgcgtaaaccatttttcagaaagtagattgtacgtctcaatagctgagtctatatcccattgatgaattcctactgcgacacgcattaacatgtgctgaggtctttcaacgatcttgttgtttattttcaacaagtaggatttttccaaagttttaaaaccaaaatagttgtatgaaaagtctcgttcgtaaataataaccgagttgagtttatccttatatttgttaactatatccatggtgatacttgaaataatcggagaatgtttcccatttttaggattaacatagttgaataaatcctccatcacttcactaaatagtttttttgtttccttgtgtagatttgatacggctattctggcggctagaatggcataatccggatgttgtgtagtacaagtggctgctatttcggctgccagagtgtccaattctaccgttgttactccattatatattccttgaataaccttcatagctattttaataggatctatatgatccgtgtttaagccataacataattttctaatacgagacgtgattttatcaaacatgacattttccttgtatccatttcgtttaatgacaaacatttttgttggtgtaataaaaaaattatttaacttttcattaatagggatttgacgtatgtagcgtacaaaatgatcgttcctggtatatagataaagagtcctatatatttgaaaatcgttacggctcgattaaactttaatgattgcatagtgaatatatcattaggatttaactccttgactatcatggcggcgccagaaattaccatcaaaagcattaatacagttatgccgatcgcagttagaacggttatagcatccaccatttatatctaaaaattagatcaaagaatatgtgacaaagtcctagttgtatactgagaattgacgaaacaatgtttcttacatatttttttcttattagtaactgacttaatagtaggaactggaaagctagacttgattattctataagtatagatacccttccaaataatattctctttgataaaagttccagaaaatgtagaattttttaaaaagttatcttttgctattaccaagattgtgtttagacgcttattattaatatgagtgatgaaatccacaccgcctctagatatcgcctttatttccacattagatggtaaatccaatagtgaaactatctttttaggaatgtatggactcgcgtttagaggagtgaacgtcttgggcgtcggaaaggatgattcgtcaaacgaataaacaatttcacaaatggatgttaatgtattagtaggaaattttttgacgctagtggaattgaagattctaatggatgatgttctacctatttcatccgataacatgttaatttccgacaccaacggttttaatatttcgatgatatacggtagtctctctttcggacttatatagcttattccacaatacgagtcattatatactccaaaaaacaaaataactagtataaaatctgtatcgaatgggaaaaacgaaattatcgacataggtatagaatccggaacattgaacgtattaatacttaattctttttctgtggtaagtaccgataggttattgacattgtatggttttaaatattctataacttgagacttgatagatattagtgatgaattgaaaattatttttatcaccacgtgtgtttcaggatcatcgtcgacgcccgtcaaccaaccgaatggagtaaaataaatatcattaatatatgctctagatattagtatttttatcaatcctttgattatcatcttctcgtaggcgaatgattccatgatcaagagtgatttgagaacatcctccggagtattaatgggcttagtaaacagtccatcgttgcaataataaaagttatccaagttaaaggatattatgcattcgtttaaagatatcacctcatctgacggagacaattttttggtaggttttagagactttgaagctacttgtttaacaaagttattcatcgtcgtctactattctatttaattttgtagttaatttatcacatatcacattaattgactttttggtccatttttccatacgtttatattcttttaatcctgcgttatccgtttccgttatatccagggatagatcttgcaagttaaatagaatgctcttaaataatgtcattttcttatccgctaaaaatttaaagaatgtataaacctttttcagagatttgaaacttttaggtggagttctagtacacaatatcataaacaaactaataaacattccacattcagattccaacagctgattaacttccacattaatacagcctattttcgctccaaatgtacattcgaaaaatctgaataaaacatcgatgtcacaatttgtattatccaatacagaatgtttgtgattcgtgttaaaaccatcggagaaggaataaaaataaaaattattatagtggtggaattcagttggaatattgcctccggagtcataaaaggatactaaacattgttttttatcataaattacacatttccaatgagacaaataacaaaatccaaacattacaaatctagaggtagaacttttaattttgtctttaagtatatacgataagatatgtttattcataaacgcgtcaaatttttcatgaatcgctaaggagtttaagaatctcatgtcaaattgtcctatataatccacttcggatccataagcaaactgagagactaagttcttaatacttcgattgctcatccaggctcctctctcaggctctattttcatcttgacgacctttggattttcaccagtatgtattcctttacgtgataaatcatcgattttcaaatccatttgtgagaagtctatcgccttagatactttttcccgtagtcgaggtttaaaaaaatacgctaacggtatactagtaggtaactcaaagacatcatatatagaatggtaacgcgtctttaactcgtcggttaactctttcttttgatcgagttcgtcgctactattgggtctgctcaggtgccccgactctactagttccaacatcataccgataggaatacaagacactttgccggcggttgtagatttatcatatttctccactacatatccgttacaatttgttaaaaatttagatacatctatattgctacataatccagctagtgaatatatatgacataataaattggtaaatcctagttctggtattttactaattactaaatctgtatatctttccatttatcatggaaaagaatttaccagatatcttcttttttccaaactgcgttaatgtattctcttacaaatattcacaagatgaattcagtaatatgagtaaaacggaacgtgatagtttctcattggccgtgtttccagttataaaacatagatggcataacgcacacgttgtaaaacataaaggaatatacaaagttagtacagaagcacgtggaaaaaaagtatctcctccatcactaggaaaacccgcacacataaacctaaccgcgaagcaatatatatacagtgaacacacaataagctttgaatgttatagttttctaaaatgtataacaaatacagaaatcaattcgttcgatgagtatatattaagaggactattagaagctggtaatagtttacagatattttccaattccgtaggtaaacgaacagatactataggtgtactagggaataagtatccatttagcaaaattccattggcctcattaactcctaaagcacaacgagagatattttcagcgtggatttctcatagacctgtagttttaactggaggaactggagtgggtaagacgtcacaggtacccaagttattgctttggtttaattatttatttggtggattctctactctagataaaatcactgactttcacgaaagaccagtcattctatctcttcctaggatagctttagttagattgcatagcaataccattttaaaatcattgggatttaaggtactagatggatctcctatttctttacggtacggatctataccggaagaattaataaacaaacaaccaaaaaaatatggaattgtattttctacccataagttatctctaacaaaactatttagttatggcactcttattatagacgaagttcatgagcatgatcaaataggagatattattatagcagtagcgagaaagcatcatacgaaaatagattctatgtttttaatgactgccacgttagaggatgacagggaacggctaaaagtatttttacctaatcccgcatttatacatattcctggagatacactgtttaaaattagcgaggtatttattcataataagataaatccatcttccagaatggcatacatagaagaagaaaagagaaatttagttactgctatacagatgtatactcctcctgatggatcatccggtatagtctttgtggcatccgttgcacagtgtcacgaatataaatcatatttagaaaaaagattaccgtatgatatgtatattattcatggtaaggtcttagatatagacgaaatattagaaaaagtgtattcatcacctaatgtatcgataattatttctactccttatttggaatccagcgttactatacgcaatgttacacacatttatgatatgggtagagtttttgtccccgctccttttggaggatcgcaacaatttatttctaaatctatgagagatcaacgaaaaggaagagtaggaagagttaatcctggtacatacgtctatttctatgatctgtcttatatgaagtctatacagcgaatagattcagaatttctacataattatatattgtacgctaataagtttaatctaacactccccgaagatttgtttataatccctacaaatttggatattctatggcgtacaaaggaatatatagactcgttcgatattagtacagaaacatggaataaattattatccaattattatatgaagatgatagagtatgctaaactttatgtactaagtcctattctcgctgaggagttggataactttgagaggacgggagaattaactagtattgtacaagaagccattttatctctaaatttacaaattaagattttaaattttaaacataaagatgatgatacgtatatacacttttgtaaaatattattcggtgtctataacggaacaaacgctactatatattatcatagacctctaacgggatatatgaatatgatttcagatactatatttgttcctgtagataataactaaaaattaaactctaatgaccacatctttttttagagatgaaaaattttccacatctccttttgtagacacgactaaacattttgcagaaaaaagtttattagtgtttagataatcgtatacttcatcagtgtagatagtaaatgtgaacagataaaaggtattcttgctcaatagattggtaaattccatagaatatattaatcctttcttcttgagatcccacatcatttcaaccagagacgttttatccaatgatttacctcgtactataccacatacaaaactagattttgcagtgacgtcgtacctggtattcctaccaaacaaaattttacttttagttcttttagaaaattctaaggtagaatctctatttgccaatatgtcatctatggaattaccactagcaaaaaatgatagaaatatatattgatacatcgcagctggttttgatctactatactttaaaaacgaatcagattccataattgcctgtatatcatcagctgaaaaactatgttttacacgtattccttcggcatttctttttaatgatatatcttgtttagacaatgataaagttatcatgtccatgagagacgcgtctccgtatcgtataaatatttcattagatgttagacgcttcattaggggtatacttctataaggtttcttaatcagtccatcattggttgcgtcaagaactactatcggatgttgttgggtatctctagtgttacacatggccttactaaagtttgggtaaataactatgatatctctattaattatagatgcatatatttcattcgtcaaggatattagtatcgacttgctatcgtcattaatacgtgtaatgtaatcatataaatcatgcgatagccaaggaaaatttaaatagatgttcatcatataatcgtcgctataattcatattaatacgttgacattgactaatttgtaatatagcctcgccacgaagaaagctctcgtattcagtttcatcgataaaggataccgttaaatataactggttgccgatagtctcatagtctattaagtggtaagtttcgtacaaatacagaatccctaaaatattatctaatgttggattaatctttaccataactgtataaaatggagacggagtcataactattttaccgtttgtacttactggaatagatgaaggaataatctccggacatgctggtaaagacccaaatgtctgtttgaagaaatccaatgttccaggtcctaatctcttaacaaaaattacgatattcgatcccgatatcctttgcattctatttaccagcatatcacgaactatattaagattatctatcatgtctattctcccaccgttatataaatcgcctccgctaagaaacgttagtatatccatacaatggaatacttcatttctaaaatagtattcgttttctaattctttaatgtgaaatcgtatactagaaagggaaaaattatctttgagttttccgttagaaaagaaccacgaaactaatgttctgattgcgtccgattccgttgctgaattaatggatttacaccaaaaactcatataacttctagatgtagaagcattcgctaaaaaattagtagaatcaaaggatataagtagatgttccaacaagtgagcaattcccaagatttcatctatatcattctcgaatccgaaattagaaattcccaagtagatatcctttttcatccgatcgttgatgaaaatacgaactttattcggtaagacaatcatttactaaggagtaaaataggaagtaatgttcgtatgtcgttatcatcgtataaattaaaggtgtgttttttaccattaagtgacattataattttaccaatattggaattataatataggtgtatttgcgcactcgcgacggttgatgcatcggtaaatatagctgtatctaatgttctagtcggtatttcatcatttcgctgtctaataatagcgttttctctatctgtttccattacagctgcctgaagtttattggtcggataatatgtaaaataataagaaatacatacgaataacaaaaataaaataagatataataaagatgccatttagagatctaattttgtttaacttgtccaaattcctacttacagaagatgaggaatcgttggagatagtgtcttccttatgtagaggatttgaaatatcttataatgacttgataacttactttccagataggaaataccataaatatatttataaagtatttgaacatgtagatttatcggaggaattaagtatggaattccatgatacaactctgagagatttagtctatcttagattgtacaagtattccaagtgtatacggccgtgttataaattaggagataatctaaaaggcatagttgttataaaggacaggaatatttatattagggaagcaaatgatgacttgatagaatatctcctcaaggaatacactcctcagatttatacatattctaatgagcgcgtccccataactggttcaaaattaattctttgtggattttctcaagttacatttatggcgtatacaacgtcgcatataacaacaaataaaaaggtagatgttctcgtttccaaaaaatgtatagatgaactagtcgatccaataaattatcaaatacttcaaaatttatttgataaaggaagcggaacaataaacaaaatactcaggaagatattttattcggtaacaggtggccaaactccataggtagctttttctatttcggattttagaatttccaaattcaccagcgatttatcggttttggtgaaatccaaggatttattaatgtccacaaatgccatttgttttgtctgtggattgtatttgaaaatggaaacgatgtagttagatagatgcgctgcaaagtttcctattagggttccgcgctttacgtcacccagcatacttgaatcaccatcctttaaaaaaaatgataagatatcaacatggagtatatcatactcggattttaattcttctactgactcactgacattttcacaaatactacaatacggtttaccgaaaataatcagtacgttcttcatttatgggtatcaaaaacttaaaatcgttactgctggaaaataaatcactgacgatattagatgataatttatacaaagtatacaatggaatatttgtggatacaatgagtatttatatagccgtcgccaattgtgtcagaaacttagaagagttaactacggtattcataaaatacgtaaacggatgggtaaaaaagggagggcatgtaaccctttttatcgatagaggaagtataaaaattaaacaagacgttagagacaagagacgtaaatattctaaattaaccaaggacagaaaaatgttagaattagaaaagtgtacatccgaaatacaaaatgttaccggatttatggaagaagaaataaaggcagaaatgcaattaaaaatcgataaactcacatttcaaatatatttatctgattctgataacataaaaatatcattgaatgagatactaacacatttcaacaataatgagaatgttacattattttattgtgatgaacgagacgcagaattcgttatgtgtctcgaggctaaaacacatttctctaccacaggagaatggccgttgataataagtaccgatcaggatactatgctatttgcatctactgataatcatcctaagatgataaaaaacttaactcaactgtttaaatatgttccctctgcagaggataactatttagcaaaattaacggcgttagtgaatggatgtgatttctttcctggactctatggggcatctataacacccaccaacttaaacaaaatacaattgtttagtgattttacaatcgataatatagtcactagtttggcaattaaaaattattatagaaagactaactctaccgtagacgtgcgtaatattgttacgtttataaacgattacgctaatttagacgatgtctactcgtatattcctccttgtcaatgcactgttcaagaatttatattttccgcattagatgaaaaatggaatgaatttaaatcatcttatttagagaccgttccgttaccctgtcaattaatgtacgcgttagaaccacgtaaggagattgatgtttcagaagttaaaactttatcatcttatatagatttcgaaaatactaaatcagatatcgatgttataaaatctatatcctcgatcttcggatattctaacgaaaactgtaacacgatagtattcggcatctataaggataatttactactgagtataaataattcattttactttaacgatagtctgttaataaccaatactaaaagtgataatataataaatataggttactagattaaaaatggtgttccaactcgtgtgctctacgtgcggcaaagatatttctcacgaacgatataaattgattatacgaaaaaaatcattaaaggatgtactcgtcagtgtaaagaacgaatgttgtaggttaaaattatctacacaaatagaacctcaacgtaacttaacagtgcaacctctattggatataaactaatatggatccggttaattttatcaagacatatgcgcctagaggttctattatttttattaattataccatgtcattaacaagtcatttgaatccatcgatagaaaaacatgtgggtatttattatggtacgttattatcggaacacttggtagttgaatcaacatatagaaaaggagttcgaatagtcccattggatagtttttttgaaggatatcttagtgcaaaagtatacatgttagagaatattcaagttatgaaaatagcagctgatacgtcattaactttattgggtattccgtatggatttggtcataatagaatgtattgttttaaattggtagctgactgttataaaaatgccggtattgatacatcgtctaaacgaatattaggtaaagatatttttctgagccaaaacttcacagacgataatagatggataaagatatatgattctaataatttaacattttggcaaattgattaccttaaagggtgagttaatatgcataactactcctccgttgttttttccctcgttctttttcttaacgttgtttgccatcactctcataatgtaaagatattctaaaatggtaaacttttgcatatcggacgcagaaattggtataaatgttgtaattgtattatttcccgtcaatggactagtcacagctccatcagttttatatcctttagagtatttctcactcgtgtctagcattctagagcattccatgatctgtttatcgttgatattggccggaaagatagattttttattttttattatattactattggcaattgtagatataacttctggtaaatatttttctaccttttcaatctcttctattttcaagccggctatatattctgctatattgttgctagtatcaataccttttcttgctaagaagtcatatgtggtattcactatatcagttttaactggtagttccattagcctttccacttctgcagaataatcagaaattggttctttaccagaaaatccagctactataataggctcaccgatgatcattggcaaaatcctatattgtaccagattaatgagagcatatttcatttccaataattctgctagttcttgagacattgatttatttgatgaatctagttggttctctagatactctaccatttctgccgcatacaataacttgttagataaaatcagggttatcaaagtgtttagcgtggctagaatagtgggcttgcatgtattaaagaatgcggtagtatgagtaaaccgttttaacgaattatatagtctccagaaatctgtggcgttacatacatgagccgaatgacatcgaagattgtccaatatttttaatagctgctctttgtccattatttctatatttgactcgcaacaattgtagataccattaatcaccgattcctttttcgatgctggacaatagcacaattgtttagctttggactctatgtattcagaattaatagatatatctctcaatacagattgcactatacattttgaaactatgtcaaaaattgtagaacgacgctgttctgcagccatttaactttaaataatttacaaaaatttaaaatgagcatccgtataaaaatcgataaactgcgccaaattgtggcatatttttcagagttcagtgaagaagtgtctataaatgtagactcgacggatgagttaatgtatatttttgccgccttgggcggatctgtaaacatttgggcaattatacctctaagtgcatcagtgttttaccgaggagccgaaaatattgtgtttaatcttcctgtgtccaaggtaaaatcgtgtttgtgtagttttcacaatgatgccatcatagatatagaacctgatctggaaaataatctagtaaaactttctagttatcatgtagtaagtgtcgattgtaacaaggaactgatgcctattaggacagatactactatttgtctaagtatagatcaaaagaaatcttacgtgtttaattttcacaagtatgaagaaaaatgttgtggtagaaccgtcattcatctagaatggttgttgggctttatcaagtgtattagtcagcatcagcatctggctattatgtttaaagatgacaatattattatgaagactcctggtaatactgatgcgttttccagggaatattctatgactgaatgttctcaagaactacaaaagttttctttcaaaatagctatctcgtctctcaacaaactacgaggattcaaaaagagagtcaatgtttttgaaactagaatcgtaatggataatgacgataacattttaggaatgttgttttcggatagagttcaatcctttaagatcaacatctttatggcgtttttagattaatactttcaatgagataaatatgggtggcggagtaagtgttgagctccctaaacgggatccgcctccgggagtacccactgatgagatgttattaaacgtggataaaatgcatgacgtgatagctcccgctaagcttttagaatatgtgcatataggaccactagcaaaagataaagaggataaagtaaagaaaagatatccagagtttagattagtcaacacaggacccggtggtctttcggcattgttaagacaatcgtataatggaaccgcacccaattgctgtcgcacttttaatcgtactcattattggaagaaggatggaaagatatcagataagtatgaagagggtgcagtattagaatcgtgttggccagacgttcacgacactggaaaatgcgatgttgatttattcgactggtgtcagggggatacgttcgatagaaacatatgccatcagtggatcggttcagcctttaataggagtaatagaactgtagagggtcaacaatcgttaataaatctgtataataagatgcaaacattatgtagtaaagatgctagtgtaccaatatgcgaatcatttttgcattatttacgcgcacacaatacagaagatagcaaagagatgatcgattatattctaagacaacagtctgcggactttaaacagaaatatatgagatgtagttatcccactagagataagttagaagagtcattaaaatatgcggaacctcgagaatgttgggatccagagtgttcgaatgccaatgttaatttcttactaacacgtaattataataatttaggactttgcaatattgtacgatgtaataccagcgtgaacaacttacagatggataaaacttcctcattaagattgtcatgtggattaagcaatagtgatagattttctactgttcccgtcaatagagcaaaagtagttcaacataatattaaacactcgttcgacctaaaattgcatttgatcagtttattatctctcttggtaatatggatactaattgtagctatttaaatgggtgccgcggcaagcatacagacgacggtgaatacactcagcgaacgtatctcgtctaaattagaacaagaagcgaacgctagtgctcaaacaaaatgtgatatagaaatcggaaatttttatatccgacaaaaccatggatgtaacctcactgttaaaaatatgtgctctgcggacgcggatgctcagttggatgctgtgttatcagccgctacagaaacatatagtggattaacaccggaacaaaaagcatacgtgccagctatgtttactgctgcgttaaacattcagacgagtgtaaacactgttgttagagattttgaaaattatgtgaaacagacttgtaattctagcgcggtcgtcgataacaaattaaagatacaaaacgtaatcatagatgaatgttacggagccccaggatctccaacaaatttggaatttattaatacaggatctagcaaaggaaattgtgccattaaagcgttgatgcaattgacgactaaggccactactcaaatagcacctagacaagttgctggtacaggagttcagttttatatgattgttatcggtgttataatattggcagcgttgtttatgtactatgccaagcgtatgttgttcacatccaccaatgataaaatcaaacttattttagccaataaggaaaacgtccattggactacttacatggacacattctttagaacttctccgatggttattgctaccacggatatgcaaaactgaaaatatattgataatattttaatagattaacatggaagttatcgctgatcgtctagacgatatagtgaaacaaaatatagcggatgaaaaatttgtagattttgttatacacggtctagagcatcaatgtcctgctatacttcgaccattaattaggttgtttattgatatactattatttgttatagtaatttatatttttacggtacgtctagtaagtagaaattatcaaatgttgttggtggtgctagtcatcacattaactattttttattactttatactataatagtactagactgacttctaacaaacatctcacctgccataaataaatgcttgatattaaagtcttctatttctaacactattccatctgtggaaaataatactctgacattatcgctaattgacacatcggtgagtgatatgcctataaagtaataatcttctttgggcacatataccagtgtaccaggttctaacaacctatttactggtgctcctgtagcatactttttctttaccttgagaatatccatcgtttgcttggtcaatagcgatatgtgattttttatcaaccactcaaaaaagtaattggagtgttcatatcctctacgggctattgtctcatggccgtgtatgaaatttaagtaacacgactgtggtagatttgttctatagagccgattgccgcaaatagatagaactaccaatatgtctgtacaaatgttaaacattaattgattaacagaaaaaacaatgttcgttctgggaatagaaaccagatcaaaacaaaattcgttagaatatatgccacgtttatacatggaatataaaataactacagtttgaaaaataacagtatcatttaaacatttaacttgcggggttaatctcacaactttactgtttttgaactgttcaaaatatagcatcgatccgtgagaaatacgtttagccgcctttaatagaggaaatcccaccgcctttctggatctcaccaacgacgatagttctgaccagcaactcatttcttcatcatccacctgttttaacatataataggcaggagatagatatccgtcattgcaatattccttctcgtaggcacacaatctaatattgataaaatctccattctcttctctgcatttattatcttgtctcggtggctgattaggctgtggtcttggtttaggctttggtatatcgttgttgaatctattttggtcattaaatctttcatttcttcctggtatatttttatcacctcgtttggttggatttttgtctatattatcgtttgtaacatcggtacgggtattcatttatcacaaaaaaaacttctctaaatgagtctactgctagaaaacctcatcgaagaagataccatattttttgcaggaagtatatctgagtatgatgatttacaaatggttattgccggcgcaaaatccaaatttccaagatctatgctttctatttttaatatagtacctagaacgatgtcaaaatatgagttggagttgattcataacgaaaatatcacaggagcaatgtttaccacaatgtataatataagaaacaatttgggtctaggagatgataaactaactattgaagccattgaaaactatttcttggatcctaacaatgaagttatgcctcttattattaataatacggatatgactgccgtcattcctaaaaaaagtggtaggagaaagaataagaacatggttatcttccgtcaaggatcatcacctatcttgtgcattttcgaaactcgtaaaaagattaatatttataaagaaaatatggaatccgcgtcgactgagtatacacctatcggagacaacaaggctttgatatctaaatatgcgggaattaatgtcctgaatgtgtattctccttccacatccataagattgaatgccatttacggattcaccaataaaaataaactagagaaacttagtactaataaggaactagaatcgtatagttctagccctcttcaagaacccattaggttaaatgattttctgggactattggaatgtgttaaaaagaatattcctctaacagatattccgacaaaggattgattactataaatggagaatgttcctaatgtatactttaatcctgtgtttatagagcccacgtttaaacattctttattaagtgtttataaacacagattaatagttttatttgaagtattcgttgtattcattctaatatatgtattttttagatctgaattaaatatgttcttcatgcctaaacgaaaaatacccgatcctattgatagattacgacgtgctaatctagcgtgtgaagacgataaattaatgatctatggattaccatggatgacaactcaaacatctgcgttatcaataaatagtaaaccgatagtgtataaagattgtgcaaagcttttgcgatcaataaatggatcacaaccagtatctcttaacgatgttcttcgcagatgatgattcattttttaagtatttggctagtcaagatgatgaatcttcattatctgatatattgcaaatcactcaatatctagactttctgttattattattgatccaatcaaaaaataaattagaagctgtgggtcattgttatgaatctctttcagaggaatacagacaattgacaaaattcacagactttcaagattttaaaaaactgtttaacaaggtccctattgttacagatggaagggtcaaacttaataaaggatatttgttcgactttgtgattagtttgatgcgattcaaaaaagaatcctctctagctaccaccgcaatagatcctgttagatacatagatcctcgtcgtgatatcgcattttctaacgtgatggatatattaaagtcgaataaagtgaacaataattaattctttattgtcatcatgaacggcggacatattcagttgataatcggccccatgttttcaggtaaaagtacagaattaattagacgagttagacgttatcaaatagctcaatataaatgcgtgactataaaatattctaacgataatagatacggaacgggactatggacgcatgataagaataattttgaagcattggaagcaactaaactatgtgatgtcttggaatcaattacagatttctccgtgataggtatcgatgaaggacagttctttccagacattgttgaattctgtgagcgtatggcaaacgaaggaaaaatagttatagtagccgcactcgatgggacatttcaacgtaaaccgtttaataatattttgaatcttattccattatctgaaatggtggtaaaactaactgctgtgtgtatgaaatgctttaaggaggcttccttttctaaacgattgggtgaggaaaccgagatagagataataggaggtaatgatatgtatcaatcggtgtgtagaaagtgttacatcgactcataatattatattttttatctaaaaaactaaaaataaacattgattaaattttaatataatacttaaaaatggatgttgtgtcgttagataaaccgtttatgtattttgaggaaattgataatgagttagattacgaaccagaaagtgcaaatgaggtcgcaaaaaaactaccgtatcaaggacagttaaaactattactaggagaattattttttcttagtaagttacagcgacacggtatattagatggtgccaccgtagtgtatataggatctgctcccggtacacatatacgttatttgagagatcatttctataatttaggagtgatcatcaaatggatgctaattgacggccgccatcatgatcctattttaaatggattgcgtgatgtgactctagtgactcggttcgttgatgaggaatatctacgatccatcaaaaaacaactgcatccttctaagattattttaatttctgatgtgagatccaaacgaggaggaaatgaacctagtacggcggatttactaagtaattacgctctacaaaatgtcatgattagtattttaaaccccgtggcatctagtcttaaatggagatgcccgtttccagatcaatggatcaaggacttttatatcccacacggtaataaaatgttacaaccttttgctccttcatattcagctgaaatgagattattaagtatttataccggtgagaacatgagactgactcgagttaccaaattagacgctgtaaattatgaaaaaaagatgtactaccttaataagatcgtccgtaacaaagtagttgttaactttgattatcctaatcaggaatatgactattttcacatgtactttatgctgaggaccgtgtactgcaataaaacatttcctactactaaagcaaaggtactatttctacaacaatctatatttcgtttcttaaatattccaacaacatcaactgaaaaagttagtcatgaaccaatacaacgtaaaatatctagcaaaaattctatgtctaaaaacagaaatagcaagagatccgtacgcggtaataaatagaaacgtactactgagatatactaccgatatagagtataatgatttagttactttaataaccgttagacataaaattgattctatgaaaactgtgtttcaggtatttaacgaatcatccataaattatactccggttgatgatgattatggagaaccaatcattataacatcgtatcttcaaaaaggtcataacaagtttcctgtaaattttctatacatagatgtggtaatatctgacttatttcctagctttgttagactagatactacagaaactaatatagttaatagtgtactacaaacaggcgatggtaaaaagactcttcgtcttcccaaaatgttagagacggaaatagttgtcaagattctctatcgccctaatataccattaaaaattgttagatttttccgcaataacatggtaactggagtagagatagccgatagatctgttatttcagtcgctgattaatcaattagtagagatgagataagaacattataataatcaataatatatcttatatcttatatcttatatcttatatcttgtttagaaaaatgctaatattaaaatagctaacgctagtaatccaatcggaagccatttgatatctataatagggtatctaatttcctgatttaaatagcggacagctatattctcggtagctactcgtttggaatcacaaacattatttacatctaatttactatctgtaatggaaacgtttcccaatgaaatggtacaatccgatacattgcattttgttatatttttttttaaagaggctggtaacaacgcatcgcttcgtttacatggctcgtaccaacaataatagggtaatcttgtatctattcctatccgtactatgcttttatcaggataaatacatttacatcgtatatcgtctttgttagcatcacagaatgcataaatttgttcgtccgtcatgataaaaatttaaagtgtaaatataactattatttttatagttgtaataaaaagggaaatttgattgtatactttcggttctttaaaagaaactgacttgataaaaatggctgtaatctctaaggttacgtatagtctatatgatcaaaaagagattaatgctacagatattatcattagtcatgttaaaaatgacgacgatatcggtaccgttaaagatggtagactaggtgctatggatggggcattatgtaagacttgtgggaaaacggaattggaatgtttcggtcactggggtaaagtaagtatttataaaactcatatagttaagcctgaatttatttcagaaattattcgtttactgaatcatatatgtattcactgcggattattgcgttcacgagaaccgtattccgacgatattaacctaaaagagttatcgggacacgctcttaggagattaaaggataaaatattatccaagaaaaagtcatgttggaacagtgaatgtatgcaaccgtatcaaaaaattactttttcaaagaaaaaggtttgtttcgtcaacaagttggatgatattaacgttcctaattctctcatctatcaaaagttaatttctattcatgaaaagttttggccattattagaaattcatcaatatccagctaacttattttatacagactactttcccatccctccgttgattattagaccggctattagtttttggatagatagtatacccaaagagaccaatgaattaacttacttattaggtatgatcgttaagaattgtaacttgaatgctgatgaacaggttatccagaaggcggtaatagaatacgatgatattaaaattatttctaataacactaccagtatcaatttatcatatattacatccggcaaaaataatatgattagaagttatatcgtcgcccgacgaaaagatcagaccgctagatctgtaattggtcccagtacatctatcaccgttaatgaggtaggaatgcccgcatatattagaaatacacttacagaaaagatatttgttaatgcctttacagtggataaagttaaacaactattagcgtcaaaccaagttaaattttactttaataaacgattaaaccaattaacaagaatacgccaaggaaagtttattaaaaataaaatacatttattgcctggtgattgggtagaagtagctgttcaagaatatacaagtattatttttggaagacagccgtctctacatagatacaacgtcatcgcttcatctatcagagctaccgaaggagatactatcaaaatatctcccggaattgccaactctcaaaatgctgatttcgacggggatgaggaatggatgatattagaacaaaatcctaaagctgtaattgaacaaagtattcttatgtatccgacgacgttactcaaacacgatattcatggagcccccgtttatggatctattcaagatgaaatcgtagcagcgtattcattgtttaggatacaagatctttgtttagatgaagtattgaacatcttggggaaatatggaagagagttcgatcctaaaggtaaatgtaaattcagcggtaaagatatctatacttacttgataggtgaaaagattaattatccgggtctcttaaaggatggtgaaattattgcaaacgacgtagatagtaattttgttgtggctatgaggcatctgtcattggctggactcttatccgatcataagtcgaacgtggaaggtatcaactttattatcaagtcatcttatgtttttaagagatatctatctatttacggttttggggtgacattcaaagatctgagaccaaattcgacgttcactaataaattggaggccatcaacgtagaaaaaatagaacttatcaaagaagcatacgccaaatatctcaacgatgtaagagacgggaaaatagttccattatctaaagctttagaggcggactatgtggaatccatgttatccaacttgacaaatcttaatatccgagagatagaagaacatatgagacaaacgctgatagatgatccagataataacctcctgaaaatggccaaagcgggttataaagtaaatcccacagaactaatgtatattctaggtacgtatggacaacaaaggattgatggtgaaccagcagagactcgagtattgggtagagttttaccttactatcttccagactctaaggatccagaaggaagaggttatattcttaattctttaacaaaaggattaacgggttctcaatattacttttcgatgctggttgcaagatctcaatctactgatatcgtctgtgaaacatcacgtaccggaacactggctagaaaaatcattaaaaagatggaggatatggtggtcgacggatacggacaagtagttataggtaatacgctcatcaagtacgccgccaattataccaaaattctaggctcagtatgtaaacctgtagatcttatctatccagatgagtccatgacttggtatttggaaattagtgctctgtggaataaaataaaacagggattcgtttactctcagaaacagaaacttgcaaagaagacattggcgccgtttaatttcctagtattcgtcaaacccaccactgaggataatgctattaaggttaaggatctgtacgatatgattcataacgtcattgatgatgtgagagagaaatacttctttacggtatctaatatagattttatggagtatatattcttgacgcatcttaatccttctagaattagaattacaaaagaaacggctatcactatctttgaaaagttctatgaaaaactcaattatactctaggtggtggaactcctattggaattatttctgcacaggtattgtctgagaagtttacacaacaagccctgtccagttttcacactactgaaaaaagtggtgccgtcaaacaaaaacttggtttcaacgagtttaataacttgactaatttgagtaagaataagaccgaaattatcactctggtatccgatgatatctctaaacttcaatctgttaagattaatttcgaatttgtatgtttgggagaattaaatccagacatcactcttcgaaaagaaacagataggtatgtagtagatataatagtcaatagattatacatcaagagagcagaaataaccgaattagtcgtcgaatatatgattgaacgatttatctcctttagcgtcattgtaaaggaatggggtatggagacattcattgaggacgaggataatattagatttactgtctacctaaatttcgttgaaccggaagaattgaatcttagtaagtttatgatggttcttccgggtgccgccaacaagggaaagattagtaaattcaagattcctatctctgactatacgggttatgacgacttcaatcaaacaaaaaagctcaataagatgactgtagaactcatgaatctaaaagaattgggttctttcgatttggaaaacgtcaacgtgtatcctggagtatggaatacatacgatatcttcggtatcgaggccgctcgtgaatacttgtgcgaagccatgttaaacacctatggagaagggttcgattatctgtatcagccttgtgatcttctcgctagtttactatgtgctagttacgaaccagaatcagtgaataaattcaagttcggcgcagctagtactcttaagagagctacgttcggagacaataaagcattgttaaacgcggctcttcataaaaagtcagaacctattaacgataatagtagctgccacttttttagcaaggtccctaatataggaactggatattacaaatactttatcgacttgggtcttctcatgagaatggaaaggaaactatctgataagatatcttctcaaaagatcaaggaaatggaagaaacagaagacttttaattcttatcaataacatatttttctatgatctgtcttttaaacgatggattttccacaaatgcgcctctcaagtccctcatagaatgatacacgtataaaaaatatagcataggcgatgactccttatttttagacattagatatgccaaaatcatagccccgcttctatttactcccgcagcacaatgaaccaacacgggctcgtttcgttgatcacatttagataaaaaggcggttacgtcgtcaaaatatttactaatatcggtagttgtatcatctaccaacggtatatgaataatattaatattagagttaggtaatgtatatttatccatcgtcaaatttaaaacatatttgaacttaacttcagatgatggtgcatccatagcatttttataatttcccaaatacacattattggttacccttgtcattatagtgggagatttggctctgtgcatatctccagttgaacgtagtagtaagtatttatacaaacttttcttatccatttataacgtacaaatggataaaactactttatcggtaaacgcgtgtaatttagaatacgttagagaaaaggctatagtaggcgtacaagcagccaaaacatcaacacttatattctttgttattatattggcaattagtgcgctattactctggtttcagacgtctgataatccagtctttaatgaattaacgagatatatgcgaattaaaaatacggttaacgattggaaatcattaacggatagcaaaacaaaattagaaagtgatagaggtagacttctagccgctggtaaggatgatatattcgacttcaaatgtgtggatttcggcgcctattttatagctatgcgattggataagaaaacatatctgccgcaagctattaggcgaggtactggagacgcgtggatggttaaaaaggcggcaaaggtcgatccatctgctcaacaattttgtcagtatttgataaaacacaagtctaataatgttattacttgtggtaatgagatgttaaatgaattaggttatagcggttattttatgtcaccgcattggtgttccgattttagtaatatggaatagtgttagataaatgcggtaacgaatgttcctgtaaggaaccataacagcttagatttaacgttaaagatgagcataaacataataaacaaaattacaatcaaacctataacattaatatcaaacaatccaaaaaatgaaatcagtggagtagtaaacgcgtacataactcctggataacgtttagcagctgccgttcctattctagaccaaaaattcggtttcatgttttcgaaacggtattctgcaacaagtcgaggatcgtgttctacatatttggcggcgttatccagtatctgcctattgatcttcatttcgttttcgattctggctatttcaaaataaaatcccgatgatagacctccagactttataatttcatctacgatgttcagcgccgtagtaactctaataatataggctgataagctaacatcataccctcctgtatatgtgaatatggcatgatttttgtccattacaagctcggttttaactttattgcctgtaataatttctctcatctgtaggatatctatttttttgtcatgcattgccttcaagacgggacgaagaaacgtaatatcctcaataacgttatcgttttctacaataactacatattctacctttttattttctaactcggtaaaaaaattagaatcccatagggctaaatgtctagcgatatttcttttcgtttcttctgtacacatagtgttacaaaaccctgaaaagaagtgagtatacttgtcatcatttctaatgtttcctccagtccactgtataaacgcataatccttgtaatgatctggatcatccttgactaccacaacatttcttttttctggcataacttcgttgtcctttacatcatcgaacttctgatcattaatatgctcatgaacattaggaaatgtttctgatggaggtctatcaataactggcacaacaataacaggagttttcaccgccgccatttagttattgaaattaatcatatacaactctttaatacgagttatattttcgtctatccattgtttcacattgacatatttcgacaaaaagatataaaatgcgtattccaatgcttctctgtttaatgaattactaaaatatacaaacacgtcactgtctggcaataaatgatatcttagaatattgtaacaatttattttgtattgcacatgttcgtgatctatgagttcttcttcgaatggcataggatctccgaatctgaaaacgtataaataggagttagaataataatatttgagagtattggtaatatataaactctttagcggtataattagtttttttctctcaatttctatttttagatgtgatggaaaaatgactaattttgtagcattagtatcatgaactctaatcaaaatcttaatatcttcgtcacacgttagctctttgaagtttttaagagatgcatcagttggttctacagatggagtaggtgcaacaattttttgttctacacatgtatgtactggagccattgttttaactataatggtgcttgtatcgaaaaactttaatgcagatagcggaagctcttcgccgcgactttctacgtcgtaattgggttctaacgccgatctctgaatggatactagttttctaagttctaatgtgattctctgaaaatgtaaatccaattcctccggcattatagatgtgtatacatcggtaaataaaactatagtatccaacgatcccttctcgcaaattctagtcttaaccaaaaaatcgtatataaccacggagatggcgtatttaagagtggattcttctaccgttttgttcttggatgtcatataggaaactataaagtccgcactactgttaagaatgattactaacgcaactatatagtttaaattaagcattttggaaacataaaataactctgtagacgatacttgactttcgaataagtttgcagacaaacgaagaaagaacagacctctcttaatttcagaagaaaactttttttcgtattcctgacgtctagagtttatatcaataagaaagttaagaattagtcggttaatgttgtatttcattacccaagtttgagatttcataatattatcaaaagacatgataatattaaagataaagcgctgactatgaacgaaatagctatatggttcgctcaagaatatagtcttgttaaacgtggaaacgataactgtatttttaatcacgtcagcggcatctaaattaaatataggtatatttattccacacactctacaatatgccacaccatcttcataataaataaattcgttagcaaaattattaattttagtgaaatagttagcgtcaactttcatagcttccttcaatctaatttgatgctcacacggtgcgaattccactctaacatcccttttccatgcctcaggttcatcgatctctataatatctagttttttgcgtttcacaaacacaggctcgtctctcgcgatgagatctgtatagtaactatgtaaatgataactagatagaaagatgtagctatatagatgacgatcctttaagagaggtataataactttaccccaatcagatagactgttgttatggtcttcggaaaaagaatttttataaatttttccagtattttccaaatatacgtacttaacatctaaaaaatccttaatgataataggaatggataatccgtctattttataaagaaatacatatcgcacattatacttttttttggaaatgggaataccgatgtgtctacataaatatgcaaagtctaaatattttttagagaatcttagttggtccaaattcttttccaagtacggtaatagatttttcatattgaacggtatcttcttaatctctggttctagttccgcattaaatgatgaaactaagtcactatttttataactaacgattacatcacctctaacatcatcatttaccagaatactgatcttcttttgtcgtaaatacatgtctaatgtgttaaaaaaaagatcatacaagttatacgtcatttcatctgtggtattcttgtcattgaaggataaactcgtactaatctcttctttaacagcctgttcaaatttatatcctatatacgaaaaaatagcaaccagtgtttgatcatccgcgtcaatattctgttctatcgtagtgtataacaatcgtatatcttcttctgtgatagtcgatacgttataaaggttgataacgaaaatatttttatttcgtgaaataaagtcatcgtaggattttggacttatattcgcgtctagtagatatgcttttatttttggaatgatctcaattagaatagtctctttagagtccatttaaagttacaaacaactaggaaattggtttatgatgtataatttttttagtttttatagattctttattctatacttaaaaaatgaaaataaatacaaaggttcttgagggttgtgttaaattgaaagcgagaaataatcataaattatttcattatcgcgatatccgttaagtttgtatcgtaatggcgtggtcaattacgaataaagcggatactagtagcttcacaaagatggctgaaatcagagctcatctaaaaaatagcgctgaaaataaagataaaaacgaggatattttcccggaagatgtaataattccatctactaagcccaaaaccaaacgagccactactcctcgtaaaccagcggctactaaaagatcaaccaaaaaggaggaagtggaagaagaagtagttatagaggaatatcatcaaacaactgaaaaaaattctccatctcctggagtcagcgacattgtagaaagcgtggccgctgtagagctcgatgatagcgacggggatgatgaacctatggtacaagttgaagctggtaaagtaaatcatagtgctagaagcgatctctctgacctaaaggtggctaccgacaatatcgttaaagatcttaagaaaattattactagaatctctgcagtatcgacggttctagaggatgttcaagcagctggtatctctagacaatttacttctatgactaaagctattacaacactatctgatctagtcaccgagggaaaatctaaagttgttcgtaaaaaagttaaaacttgtaagaagtaaatgcgtgcacttttttataaagatggtaaactctttaccgataataattttttaaatcctgtatcagacgataatccagcgtatgaggttttgcaacatgttaaaattcctactcatttaacagatgtagtagtatatgaacaaacgtgggaggaggcgttaactagattaatttttgtgggaagcgattcaaaaggacgtagacaatacttttacggaaaaatgcatgtacagaatcgcaacgctaaaagagatcgtatttttgttagagtatataacgttatgaaacgaattaattgttttataaacaaaaatataaagaaatcgtccacagattccaattatcagttggcggtttttatgttaatggaaactatgttttttattagatttggtaaaatgaaatatcttaaggagaatgaaacagtagggttattaacactaaaaaataaacacatagaaataagtcccgatgaaatagttatcaagtttgtaggaaaggacaaagtttcacatgaatttgttgttcataagtctaatagactatataaaccgctattgaaactgacggatgattctagtcccgaagaatttctgttcaacaaactaagtgaacgaaaggtatacgaatgtatcaaacagtttggtattagaatcaaggatctccgaacgtatggagtcaattatacgtttttatataatttttggacaaatgtaaagtccatatctcctcttccgtcaccaaaaaagttaatagcgttaactatcaaacaaactgctgaagtggtaggtcatactccatcaatttcaaaaagagcttatatggcaacgactattttagaaatggtaaaggataaaaattttttagatgtagtatctaaaactacgttcgatgaattcctatctatagtcgtagatcacgttaaatcatctacggatggatgatatagatctttacacaaataattacaagaccgataaatggaaatggataagcgtataaaatctctcgcaatgaccgctttctttggggagctaagcacattagatattatggcattgataatgtctatatttaaacgccatccaaacaataccattttttcagtggataaggatggtcagtttatgattgatttcgaatacgataattataaggcttctcaatatttggatctgaccctcactccgatatttggagatgaatgcaagactcacgcatcgagtatagccgaacaattggcgtgtgcggatattattaaagaggatattagcgaatacatcaaaactactccccgtcttaaacgatttataaaaaaataccgcaatagatcagatactcgtatcagtcgagatacagaaaagcttaaaatagctctagctaaaggcatagattacgaatatataaaagacgcttgttaataagtaaatgaaaaaaaactagtcgtttataataaaacacgatatggatgccaacgtagtatcatcttctactattgcgacgtatatagacgctttagcgaagaatgcttcagaattagaacagaggtctaccgcatacgaaataaataatgaattggaactagtatttattaagccgccattgattactttgacaaatgtagtgaatatctctacgattcaggaatcgtttattcgatttaccgttactaataaggaaggtgttaaaattagaactaagattccattatctaaggtacatggtctagatgtaaaaaatgtacagttagtagatgctatagataacatagtttgggaaaagaaatcattagtgacggaaaatcgtcttcacaaagaatgcttgttgagactatcgacagaggaacgtcatatatttttggattacaagaaatatggatcctctatccgactagaattagtcaatcttattcaagcaaaaacaaaaaactttacgatagactttaagctaaaatattttctaggatccggtgcccaatctaaaagttctttgttgcacgctattaatcatccaaagtcaaggcctaatacatctctggaaatagaattcacacctagagacaatgaaacagttccatatgatgaactaataaaggaattgacgactctctcgcgtcatatatttatggcttctccagagaatgtaattctttctccgcctattaacgcgcctataaaaacctttatgttgcctaaacaagatatagtaggtttggatctggaaaatctatatgccgtaactaagactgacggcattcctataactatcagagttacatcaaacgggttgtattgttattttacacatcttggttatattattagatatcctgttaagagaataatagattccgaagtagtagtctttggtgaggcagttaaggataagaactggaccgtatatctcattaagctaatagagcccgtgaatgctatcagtgatagactagaagaaagtaagtatgttgaatctaaactagtggatatttgtgatcggatagtattcaagtcaaagaaatacgaaggtccgtttactacaactagtgaagtcgtcgatatgttatctacatatttaccaaagcaaccagaaggtgttattctgttctattcaaagggacctaaatctaacattgattttaaaattaaaaaggaaaatactatagaccaaactgcaaatgtagtatttaggtacatgtccagtgaaccaattatctttggagaatcgtctatctttgtagagtataagaaatttagcaacgataaaggctttcctaaagaatatggttctggtaagattgtgttatataacggcgttaattatctaaataatatctattgtttggaatatattaatacacataatgaagtgggtattaagtccgtggttgtacctattaagtttatagcagaattcttagttaatggagaaatacttaaacctagaattgataaaaccatgaaatatattaactcagaagattattatggaaatcaacataatatcatagtcgaacatttaagagatcaaagcatcaaaataggagatatctttaacgaggataaactatcggatgtgggacatcaatacgccaataatgataaatttagattaaatccagaagttagttattttacgaataaacgaactagaggaccgttgggaattttatcaaactacgtcaagactcttcttatttctatgtattgttccaaaacatttttagacgattccaacaaacgaaaggtattggcgattgattttggaaacggtgctgacctggaaaaatacttttatggagagattgcgttattggtagcgacggatccggatgctgatgctatagctagaggaaatgaaagatacaacaaattaaactctggaattaaaaccaagtactacaaatttgactacattcaggaaactattcgatccgatacatttgtctctagtgtcagagaagtattctattttggaaagtttaatatcatcgactggcagtttgctatccattattcttttcatccgagacattatgctaccgtcatgaataacttatccgaactaactgcttctggaggcaaggtattaatcactaccatggacggagacaaattatcaaaattaacagataaaaagacttttataattcataagaatttacctagtagcgaaaactatatgtctgtagaaaaaatagctgatgatagaatagtggtatataatccatcaacaatgtctactccaatgactgaatacattatcaaaaagaacgatatagtcagagtgtttaacgaatacggatttgttcttgtagataacgttgatttcgctacaattatagaacgaagtaaaaagtttattaatggcgcatctacaatggaagatagaccgtctacaaaaaactttttcgaactaaatagaggagccattaaatgtgaaggtttagatgtcgaagacttacttagttactatgttgtttatgtcttttctaagcggtaaataataatatggtatgggttctgatatccccgttctaaatgcattaaataattccaatagagcgatttttgttcctataggaccttccaactgtggatactctgtattgttaatagatatattaatacttttgtcgggtaacagaggttctacgtcttctaaaaataaaagttttataacatctggcctgttcataaataaaaacttggcgattctatatatactcttattatcaaatctagccattgtcttatagatgtgagctactgtaggtgtaccatttgattttctttctaatactatatatttctctcgaagaagttcttgcacatcatctgggaataaaatactactgttgagtaaatcagttattttttttatatcgatattgatggacatttttatagttaaggataataagtatcccaaagtcgataacgacgataacgaagtatttatacttttaggaaatcacaatgactttatcagattaaaattaacaaaattaaaggagcatgtatttttttctgaatatattgtgactccagatacatatggatctttatgcgtcgaattaaatgggtctagttttcagcacggtggtagatatatagaggtggaggaatttatagatgctggaagacaagttagatggtgttctacatccaatcatatatctaaagatatacccgaagatatgcacactgataaatttgtcatttatgatatatacacttttgacgctttcaagaataaacgattggtattcgtacaggtacctccgtcgttaggagatgatagtcatttgactaatccgttattgtcaccgtattatcgtaattcagtagccagacaactggtcaataatatgatttttaatcaagattcatttttaaaatatttattagaacatctgattagaagccactatagagtttctaaacatataacaatagttagatacaaggataccgaagaattaaatctaacgagaatatgttataatagagataagtttaaggcgtttgtattcgcttggtttaacggcgtttcggaaaatgaaaaggtactagatacgtataaaaaggtatctaatttgatataatgaattcagtgactgtatcacacgcgccatatactattacttatcacgatgattgggaaccagtaatgagtcaattggtagagttttataacgaagtagctagttggctgctacgagacgagacgtcgcctattcctgataagttctttatacagttgaaacaaccgcttagaaataaacgagtatgtgtgtgcggtatagatccgtatccgaaagatggaactggtgtaccgttcgaatcaccaaattttacaaaaaaatcaattaaggagatagcttcatctatatctagattaaccggagtaattgattataaaggttataaccttaatataatagacggggttataccctggaattattacttaagttgtaaattaggagaaacaaaaagtcacgcgatctactgggataaaatttctaagttactgctgcagcatataactaaacacgttagtgttctttattgtttgggtaaaacagatttctcgaatatacgggccaagttagaatccccggtaactaccatagtcggatatcatccagcggctagagaccgccaattcgagaaagatagatcatttgaaattatcaacgttttactggaattagacaacaaggcacctataaattgggctcaagggtttatttattaatgctttagtgaaattttaacttgtgttctaaatggatgcggctattagaggtaatgatgttatctttgttcttaagactataggtgtcccgtcagcgtgcagacaaaatgaagatccaagatttgtagaagcatttaaatgcgacgagttagaaagatatattgagaataatccagaatgtacactattcgaaagtcttagggatgaggaagcatactctatagtcagaattttcatggatgtagatttagacgcgtgtctagacgaaatagattatttaacggccattcaagattttattatcgaggtgtcaaactgtgtagctagattcgcgtttacagaatgcggcgccattcatgaaaatgtaataaaatccatgagatctaatttttcattgactaagtctacaaatagagataaaacaagttttcatattatctttttagatacgtataccactatggatacattgatagctatgaaacgaacactattagaattaagtagatcatctgaaaatccactaaccagatcgatagacactgccgtatataggagaaaaacaactcttcgggttgtaggtactaggaaaaatccaaattgcgacactattcatgtaatgcaaccaccgcatgataatatagaagattacctattcacttacgtggatatgaacaacaatagttattacttttctctacaacaacgattggaggatttagttcctgataagttatgggaaccagggtttatttcattcgaagacgctataaaaagagtttcaaaaatattcattaattctataataaactttaatgatctcgatgaaaataattttacaacggtaccactggtcatagattacgtaacaccttgtgcattatgtaaaaaacgatcgcataaacatccgcatcaactatcgttggaaaatggtgctattagaatttacaaaactggtaatccacatagttgtaaagttaaaattgttccgttggatggtaataaactgtttaatattgcacaaagaattttagacactaactctgttttattaaccgaacgaggagaccatatagtttggattaataattcatggaaatttaacagcgaagaacccttgataacaaaactaattttgtcaataagacatcaactacctaaggaatattcaagcgaattactctgtccgaggaaacgaaagactgtagaagctaacatacgagacatgttagtagattcagtagagaccgatacctatccggataaacttccgtttaaaaatggtgtattggacctggtagacggaatgttttactctggagatgatgctaaaaaatatacgtgtactgtatcaaccggatttaaatttgacgatacaaagttcgtcgaagacagtccagaaatggaagagttaatgaatatcattaacgatatccaaccattaacggatgaaaataagaaaaatagagagctatatgaaaaaacattatctagttgtttatgcggtgctaccaaaggatgtttaacattcttttttggagaaactgcaactggaaagtcgacaaccaaacgtttgttaaagtctgctatcggtgacctgtttgttgagacgggtcaaacaattttaacagatgtattggataaaggacctaatccatttatcgctaacatgcatttgaaaagatctgtattctgtagcgaactacctgattttgcatgtagtgggtcaaagaaaatcagatctgataatattaaaaagttgacagaaccttgtgtcattggaagaccgtgtttctccaataaaattaataatagaaaccatgcgacaatcattatcgatactaattacaaacctgtttttgataggatagataacgcattaatgagaagaattgccgtcgtgcgattcagaacacacttttctcaaccttctggtagagaggctgctgaaaataatgacgcgtacgataaagtcaaactattagacgaggggttagatggtaaaatacaaaataatagatatagatttgcatttctatacttgttggtgaaatggtacagaaaatatcatgttcctattatgaaactatatcctacaccggaagagattcctgactttgcattctatctcaaaataggtactctgttagtatctagctctgtaaagcatattccattaatgacggacctctccaaaaagggatatatattgtacgataatgtggtcactcttccgttgactactttccaacagaaaatatccaagtattttaattctagactatttggacacgatatagagagcttcatcaatagacataagaaatttgccaatgttagtgatgaatatctgcaatatatattcatagaggatatttcatctccgtaaatatatgctcatatatttatagaagatatcacatatctaaatgaataccggaatcatagatttatttgataatcatgttgatagtataccaactatattacctcatcagttagctactctagattatctagttagaactatcatagatgagaacagaagcgtgttattgttccatattatgggatcaggtaaaacaataatcgctttgttgttcgccttggtagcttccagatttaaaaaggtttacattctagtgccgaacatcaacatcttaaaaattttcaattataatatgggtgtagctatgaacttgtttaatgacaaattcatagctgagaatatctttattcattccacaacaagtttttattctcttaattataacgataacgtcattaattataacggattatctcgctacaataactctatttttatcgttgatgaggcacataatatctttgggaataatactggagaacttatgaccgtgataaaaaataaaaacaagattccttttttactattgtctggatctcccattactaacacacctaatactctgggtcatattatagatttaatgtccgaagagacgatagattttggtgaaattattagtcgtggtaagaaagtaattcagacacttcttaacgaacgcggtgtgaatgtacttaaggatttgcttaaaggaagaatatcatattacgaaatgcctgataaagatctaccaacgataagatatcacggacgtaagtttctagatactagagtagtatattgtcacatgtctaaacttcaagagagagattatatgattactagacgacagctatgttatcatgaaatgtttgataaaaatatgtataacgtgtcaatggcagtattgggacaacttaatctgatgaataatttagatactttatttcaggaacaggataaggaattgtacccaaatctgaaaataaataatggcgtgttatacggagaagaattggtaacgttaaacattagttccaaatttaaatactttattaatcggatacagacactcaacggaaaacattttatatacttttctaattctacatatggcggattggtaattaaatatatcatgctcagtaatggatattctgaatataatggttctcagggaactaatccacatatgataaacggcaaaccaaaaacatttgctatcgttactagtaaaatgaaatcgtctttagaggatctattagatgtgtataattctcctgaaaacgatgatggtagtcaattgatgtttttgttttcgtcaaacattatgtccgaatcctatactctgaaagaggtaaggcatatttggtttatgactatcccagatactttttctcaatacaaccaaattcttggacgatctattagaaaattctcttacgccgatatttctgaaccagttaatgtatatcttttagccgccgtatattccgatttcaatgacgaagtgacgtcattaaacgattacacacaggatgaattaattaatgttttaccatttgacatcaaaaagctgttatatctaaaatttaagacgaaagaaacgaatagaatatactctattcttcaagagatgtctgaaacgtattctcttccaccacatccatcaattgtaaaagttttattgggagaattggtcagacaatttttttataataattctcgtattaagtataacgataccaagttacttaaaatggttacatcagttataaaaaataaagaagacgctaggaattacatagatgatattgtaaacggtcacttctttgtatcgaataaagtatttgataaatctcttttatacaaatacgaaaacgatattattacagtaccgtttagactttcctacgaaccatttgtttggggagttaactttcgtaaagaatataacgtggtatcttctccataaaactgatgagatatataaagaaataaatgtcgagctttgttaccaatggatacctttccgttacattggaacctcatgagctgacgttagacataaaaactaatattaggaatgccgtatataagacgtatctccatagagaaattagtggtaaaatggccaagaaaatagaaattcgtgaagacgtggaattacctctcggcgaaatagttaataattctgtagttataaacgttccgtgtgtaataacctacgcgtattatcacgttggggatatagtcagaggaacattaaacatcgaagatgaatcaaatgtaactattcaatgtggagatttaatctgtaaactaagtagagattcgggtactgtatcatttagcgattcaaagtactgcttttttcgaaatggtaatgcgtatgacaatggcagcgaagtcactgccgttctaatggaggctcaacaaggtatcgaatctagttttgtttttctcgcgaatatcgtcgactcataagaaagagaatagcggtaagtataaacacgaatactatggcaataattgcgaatgttttattctcttcgatatatttttgataatatgaaaaacatgtctctctcaaatcggacaaccatctcataaaatagttctcgcgcgctggagaggtagttgccgctcgtataatctccccagaataatatacttgcgtgtcgtcgttcaatttatacggatttctatagttctctgttatataatgcggttttccatcatgattagacgacgacaatagtgttctaaatttagatagttgatcagaatgaatgtttattggcgttggaaaaattatccatacagcgtctgcagagtggttgatagttgttcctagatatgtaaaataatccaacttactaggcagcaaattgtctagataaaatactgaatcaaacggtgcagacgtattggcggatctaatggaatccaattgattaactatcttttgaaaatatacatttttatgatccaatacttgtaagaatatagaaataatgataagtccatcatcgtgtttttttgcctcttcataagaactatattttttcttattccaatgaacaagattaatctctccagagtatttgtacacatctatcaagtgattggatccataatcgtcttcctttccccaatatatatgtagtgatgataacacatattcattggggagaaaccctccacttatatatcctcctttaaaattaatccttactagttttccagtgttctggatagtggttggtttcgactcattataatgtatgtctaacggcttcaatcgcgcgttagaaattgcttttttagtttctatattaataggagatagttgttgcggcatagtaaaaatgaaatgataactgtttaaaaatagctcttagtatgggaattacaatggatgaggaagtgatatttgaaactcctagagaattaatatctattaaacgaataaaagatattccaagatcaaaagacacgcatgtgtttgctgcgtgtataacaagtgacggatatccgttaataggagctagaagaacttcattcgcgttccaggcgatattatctcaacaaaattcagattctatctttagagtatccactaaactattacggtttatgtactacaatgaactaagagaaatctttagacggttgagaaaaggttctatcaacaatatcgatcctcactttgaagagttaatattattgggtggtaaactagataaaaaggaatctattaaagattgtttaagaagagaattaaaagaggaaagtgatgaacgtataacagtaaaagaatttggaaatgtaattctaaaacttacaacacgggataaattatttaataaagtatatataagttattgcatggcgtgttttattaatcaatcgttggaggatttatcgcatactagtatttacaatgtagaaattagaaagattaaatcattaaatgattgtattaacgacgataaatacgaatatctgtcttatatttataatatgctagttaatagtaaatgaacttttacagatctagtataattagtcagattattaagtataatagacgactagctaagtctattatttgcgaggatgactctcaaattattacactcacggcattcgttaaccaatgcctatggtgtcataaacgagtatccgtgtccgctattttattaactactgataacaaaatattagtatgtaacagacgagatagttttctctattctgaaataattagaactagaaacatgtttagaaagaaacgattatttctgaattattccaattatttgaacaaacaggaaagaagtatactatcgtcatttttttctctagatccagctactactgataatgatagaatagacgctatttatccgggtggcatacccaaaaggggtgagaatgttccagagtgtttatccagggaaattaaagaagaagttaatatagacaattcttttgtattcatagacactcggttttttattcatggcatcatagaagataccattattaataaattttttgaggtaatcttctttgtcggaagaatatctctaacgagtgatcaaatcattgatacatttaaaagtaatcatgaaatcaaggatctaatatttttagatccgaattcaggtaatggactccaatacgaaattgcaaaatatgctctagatactgcaaaacttaaatgttacggccatagaggatgttattacgaatcattaaaaaaattaactgaggatgattgattagaaaatataaattaatttaccatcgtgtatttttataacgggattgtccggcatatcatgtagatagttaccgtctacatcgtatactcgaccatctacgcctttaaatcctctatttattgacattaatctattagaattggaataccaaatattagtaccctcaattagtttattggtaatattttttttagacgatagatcgatggctcttgaaaccaaggttttccaaccggactcattgtcgatcggtgagaagtctttttcattagcatgaatccattctaatgatgtatgtttaaacactctaaacaattggacaaattcttttgatttgctttgaatgatttcaaataggtcttcgtctacagtaggcataccattagataatctagccattataaagtgcacgtttacatatctacgttctggaggagtaagaacgtgactattgagacgaatggctcttcctactatctgacgaagagacgcctcgttccatgtcatatctaaaatgaagatatcattaattgagaaaaaactaataccctcgcctccactagaagagaatacgcatgttttaatgcattctccgttagtgtttgattcttggttaaactcagccaccgccttgattctagtatcttttgttctagatgagaactctatattagagataccaaagactttgaaatatagtaataagatttctattcctgactgattaacaaatggttcaaagactagacatttaccatgggatgctaatattcccaaacatacatctataaatttgacgcttttctcttttaattcagtaaatagagagatatcagccgcactagcatcccctttcaatagttctccctttttaaaggtatctaatgcggatttagaaaactctctatctcttaatgaatttttaaaatcattatatagtgttgctatctcttgcgcgtattcgcccggatcacgattttgtctttcaggaaagctatcgaacgtaaacgtagtagccatacgtctcagaattctaaatgatgatatacctgtttttatttcagcgagtttagccttttgataaatttcttcttgctttttcgacatattaacgtatcgcattaatactgttttcttagcgaatgatgcagacccttctacgtcatcaaaaatagaaaactcgttattaactatatacgaacatagtcctcctagtttggagactaattctttttcatcgactagacgtttattctcaaatagtgattggtgttgtaaggatcctggtcgtagtaagttaaccaacatggtgaattcttgcacactattgacgataggtgtagccgataaacaaatcatcttatggttttttaacgcaatggtcttagataaaaaattatatactgaacgagtaggacggatcttaccatcttctttgattaatgatttagaaatgaagttatgacattcatcaatgatgacgcatattctactcttggaattaatagttttgatattagtaaaaaatttatttctaaaattttgatcatcgtaattaataaaaatacaatccttcgttatctctggagcgtatctgagtatagtgttcatccaaggatcttctatcaaagcctttttcaccaataagataatagcccaattcgtataaatatccttaagatgtttgagaatatatacagtagtcattgttttaccgacacccgtttcatggaacaataaaagagaatgcatactgtctaatcctaagaaaactcttgctacaaaatgttgataatccttgaggcgtactacgtccgaccccatcatttcaacgggcatattagtagttctgcgtaaggcataatcgatataggccgcgtgtgatttactcatttatgagtgataagtaataactatgttttaaaaatcacagcagtagtttaactagtcttctctgatgtttgttttcgatactttttgaatcagaagtcatactagaataaagcaacgagtgaacgtaatagagagcttcgtatactctattcgaaaactctaagaacttattaatgaattccgtatccactggattgtttaaaatactaaattgaacactgttcacatccttccaagaagaagacttagtgacggacttaacatgagacataaataaatccaaattttttttacaaacatcactagccaccataatggcgctatctttcaaccagctatcgcttacgcattttagcagtctaacatttttaaagagactacaatatattctcatagtatcgattacacctctaccgaataaagttggaagtttaataatacaatatttttcgtttacaaaatcaaataatggtcgaaacacgtcgaaggttaacatcttataatcgctaatgtatagattgttttcagtgagatgattattagatttaatagcatctcgttcacgtttgaacagtttattgcgtgcgctgaggtcggcaactacggcgtccgctttagtactcctcccataatactttacgctattaatctttaaaatttcatagactttatctagatcgctttctggtaacatgatatcatgtgtaaaaagttttaacatgtcggtcggcattctatttagatcattaactctagaaatctgaagaaagtaattagctccgtattccagactaggtaatgggcttttacctagagacagattaagttctggcaatgtttcataaaatggaagaaggacatgcgttccctcccggatattttttacaatttcatccatttacaactctatagtttgttttcattattattagttattatctcccataatcttggtaatacttaccccttgatcgtaagataccttatacaggtcattacatacaactaccaattgtttttgtacataatagattggatggttgacatccatggtggaataaactactcgaacagatagtttatctttccccctagatacattagccgtaatagttgtcggcctaaagaatatctttggtgtaaagttaaaagttagggttcttgttccattattgctttttgtcagtagttcattataaattctcgagatgggtccgttctctgaatatagaacatcatttccaaatctaacttctagtctagaaataatatcggtcttattcttaaaatctattcccttgatgaagggatcgttaatgaacaaatccttggcctttgattcggctgatctattatctccgttatagacgttacgttgactagtccaaagacttacaggaatagatgtatcgatgatgttgatactatgtgatatgtgagcaaagattgttctcttagtggcatcactatatgttccagtaatggcggaaaactttttagaaatgttatatataaaagaattttttcgtgttccaaacattagcagattagtatgaagataaacactcatattatcaggaacattatcaatttttacatacacatcagcatcttgaatagaaacgataccatcttctggaacctctacgatctcggcagactccggataaccagtcggtgggccatcgctaacaataactagatcatccaacaatctactcacatatgcatctatataatctttttcatcttgtgagtaccctggatacgaaataaatttattatccgtatttccataataaggtttagtataaacagagagagatgttgccgcatgaacttcagttacagtcgccgttggttggtttatttgacctattactctcctaggtttctctataaacgatggtttaatttgtacattcttaaccatatatccaataaagctcaattcaggaacataaacaaattctttgttgaacgtttcaaagtcgaacgaagagtcacgaataacgatatcggatactggattgaaggttaccgttacggtaatttttgaatcggatagtttaagactgctgaatgtatcttccacatcaaacggagttttaatataaacgtatactgtagatggttctttaatagtgtcattaggagttaggccaatagaaatatcattaagttcactagaatatccagagtgtttcaaagcaattgtattattgatacaattattatataattcttcgccctcaatttcccaaataacaccgttacacgaagagatagatacgtgattaatacatttatatccaacatatggtacgtaactgaatcttcccatacctttaacttctggaagttccaaactcagaaccaaatgattaagcgcagtaatatactgatccctaatttcgaagctagcgatagcctgattgtctggaccatcgtttgtcataactccggatagagaaatatattgcggcatatataaagttggaatttgactatcgactgcgaagacattagaccgtttaatagagtcatccccaccgatcaaagaattaatgatagtattattcattttctatttaaaatggaaaaagcttacaataaactccgtagagaaatatctataatttgtgagttttccttaaagtaacagcttccgtaaacgccgtctttatctcttagtaggtttattgtatttatgaccttttccttatcttcatagaatactaaaggcaacaaagaaatttttggttcttctctaagagctacgtgagacttaaccatagaagccaacgaatccctacatattttagaacagaaataccctacttcaccacccttgtatgtctcaatactaataggtctaaaaaccaaatcttgattacaaaaccaacacttatcaattacactatttgtcttaatagacacatctgccatagatttataatactttggtagtatacaagcgagtgcttcttctttagcgggcttaaagactgctttaggtgctgaaataaccacatctggaaggcttactcgcttagccatttaattacggaactatttttttatacttctaatgagcaagtagaaaacctctcatctacaaaaacgtactcgtgtccataatcctctaccatagttacacgttttttagatctcatatgtgctaaaaagttttcccatactaattggttactattatttttcgtataatttttaacagtttgaggttttagatttttagttacagaagtgatatcgaatattttatccaaaaagaatgaataattaattgtcttagaaggagtgttttcttggcaaaagaataccaagtgcttaaatatttctactacttcattaatcttttctgtactcagattcagtttctcatcttttacttgattgattatttcaaagactaacttataatcctttttatttattctctcgttagccttaagaaaactagatacaaaatttgcatctacatcatccgtggatatttgatttttttccatgatatccaagagttccgagataatttctccagaacattgatgagacaataatctccgcaatacatttctcaaatgaataagtttattagacacgtggaagtttgactttttttgtacctttgtacatttttgaaatacagactcgcaaaaaatacaatattcatatccttgttcagatactataccgttatgtctacaaccgctacataatcgtagattcatgttaacactctacgtatctcgtcgtccaatattttatataaaaacattttatttctagacgttgccagaaaatcctgtaatatttttagttttttgggctgtgaataaagtatcgccctaatatggttaccgtcctccgccaatatagtagttaaattatccgcacatgcagaagaacaccgcttaggcggattcagtacaatgttatatttttcgtaccaactcatttaaatatcataatctaaaatagttctgtaatatgtctagcgctaatatattgatcataatcctgtgcataaattaagatacaacaatgtctcgaaatcatcgacatggcttcttccatagttagaagatcgtcgtcaaagttagcaacgtgattcatcaacatttgctgttttgaggcagcaaatactgaaccgtcgccattcaaccattcataaaaaccatcgtctgaatccattgataatttcttgtactggtttttgagagctcgcatcaatctagcatttctagctcccggattgaaaacagaaagaggatcgtacatccagggtccattttctgtaaatagaatcgtataatgtcccttcaagaagatatcagacgatccacaatcaaagaattggtctccgagtttgtaacaaactgcggactttaacctatacatgataccgtttagcataatttctggtgatacgtcaatcggagtatcatctattagagatctaaagccggtgtaacattctccaccaaacatattcttattctgacgtcgttctacataaaacatcattgctccattaacgataacaggggaatgaacagcactacccatcacattagttcccaatggatcaatgtgtgtaactccagaacatcttccatagcctatgttaggaggagcgaacaccactcttccactattgccatcgaatgccatagaataaatatccttggaattgatagaaatcggactgtcggatgttgtgatcatcttcataggattaacaactatgtatggtgccgcctgaagtttcatatcgtaactgatgccgtttataggtctagccacagaaaccaacgtaggtctaaatccaactatagacaaaatagaagccaatatctgttcctcatctgtcataacttgagagcatccagtatgaataatcttcattagatggggatctaccgcatcatcatcgttacaataaaaaattcccattctaatgttcataattgcttttctaatcatggtatgcatgtttgctctctgaatctctgtggaaattagatctgatacacctgtaatcactatcggattatcctccgtaagacgattaaccaacaacatataattataagactttacttttctaaattcataaagttgctggattaggctataggtgtctccatgtacatacgcgttctcgagcgcaggaagtttaataccgaatagtgccatcagaataggatgaatatagtaattagtttctggttttctataaataaaagacaaatcttgtgaactagacatatcggtaaaatgcatggattggaatcgtgtagtcgacagaagaatatgatgattagatggagagtatattttatctaactctttgagttggtcaccgattctaggactagctcgagaatgaataagtactaaaggatgagtacatttcacagaaacactagcattgttcaatgtgctctttacatgggtaaggagttgaaatagctcgtttctatttgttctgacaatatttagtttattcataatgttaagcatatcctgaatagtaaagttagatgtgtcatacttgttagtagttagatatttagcaattgcattcccatcatttctcaatctcgtactccaatcatgtgtagatgctacttcgtcgatggaaaccatacaatcctttttgataggctgttgagattgatcatttcctgcacgtttaggtttggtacgttgatttctagcccctgcggatataaagtcatcgtctacaatttgggacaatgaattgcatacactacaagacaaagatttatcagaagtgtgaatatgatcttcatctaccaaagaaagagtttgattagtataactagattttagtcctgcgttagatgttaaaaaaacatcgctattgaccacggcttccattatttatattcgtagtttttactcgaaagcgtgattttaatatccaatcttattacttttggaatcgttcaaaacctttgactagttgtagaatttgatctattgccctacgcgtatactcccttgcatcatatacgttcgtcaccagatcgtttgtttcggcctgaagttggtgcatatctctttcaacattcgacatgagatccttaagggccatatcgtctagattttgttgagatgctgctcctggatttggattttgttgtgctgttgtacatactgtaccaccagtaggtgtaggagtacatacagtggccacaataggaggttgagaaagtgtaaccgttggagtagtacaagaaatacttccatccgattgttgtgtacatgtagttgttggtaacgtctgagaaggttgggtagatggcggcgtcgtcgttttttgatctttattaaatttagagataatatcctgaacagcattgctcggcgtcaacgctggaaggagtgaactcgccggcgcatcagtatcttcagacagccaatcaaaaagattagacatatcagatgatgtattagtttgttgtcgtggttttggtgtaggagcagtactactaggtagaagaataggagccgatgtagctgttggaaccggctgtggagttatatgaatagttggttgtagcggttggataggctgtctgctggcggccatcatattatctctagctagttgttctcgcaactgtctttgataatacgactcttgagactttagtcctatttcaatcgcttcatcctttttcgtatccggatccttttcttcagaataatagattgacgactttggtgtagaggattctgccagcctctgtgagaacttgttaaagaagtccatttaaggctttaaaattgaattgcgattataagattaaatggcagacacagacgatattatcgactatgaatccgatgatctcaccgaatacgaggatgatgaagaagaggaagaagatggagagtcactagaaactagtgatatagatcccaaatcttcttataagattgtagaatcagcatccactcatatagaagatgcgcattccaatcttaaacatatagggaatcatatatctgctcttaaacgacgctatactagacgtataagtctatttgaaatagcgggtataatagcagaaagctataacttgcttcaacgaggaagattacctctagtttcagaattttctgacgaaacgatgaagcaaaatatgctacatgtaattatacaagagatagaggagggttcttgtcctatagtcatcgaaaagaacggagaattgttgtcggtaaacgattttgacaaagatggtctaaaattccatctagactatattatcaaaatttggaaacttcaaaaacgatattagaatttatacgaatatcgttctctaaatgtcacaatcaagtctcgcatgttcagcaatttattgtcgtactttatatcgtgttcattaacgatatcttgcaaaatagtaatgattctatcttccttcgatagatattcttcagagattattgtcttatattctttcttgttatcagatatgaatttgataagactttgaacattattgatacccgtctgtttaattttttctacagatattttagttttggcagattctatcgtatctgtcaatagacatccaacatcgacattcgacgtcaattgtctataaatcaacgtataaattttagaaataacattagcgaattgttgtgcgttgatgtcgttattctgaaacagtatgattttaggtagcattttcttaacaaagagaacgtatttattgttactcagttgaacagatgatatatccagattactaacgcatctgattccgtataccaaactttcagaagaaatggtatacaattgtttgtattcattcaatgtctctttttcagaaattagtttagagtcgaatactgcaataattttcaagagatagttttcatcagataagattttatttagtgtagatatgataaaactattgttttgttggagaacttgatacgccgcgttctctgtagtcgacgctctcaaatgggaaacaatctccattatttttttggaatcggatactatatcttcggtatcttgacgcagtctagtatacatagagttaagagagattagagtttgtacattaagcaacatgtctctaaatgtggctacaaacttttcctttttcacatcatctagtttattatataccgatttcacaacggcaccagatttaaggaaccagaatgaaaaactctgataactacaatatttcatcatagttacgattttatcatcttctatagttggtgtaatagcgcatacctttttctccaagactggaaccaacgtcataaaaatgtttaaatcaaaatccatatcaacatctgatgcgctaagaccagtctcgcgttcaagattatctttactaatggtgacgaactcatcgtataaaactctaagtttgtccattatttatttacagatttagttgtttaatttatttgtgctcttccagagttgggatagtatttttctaacgtcggtattatattattaggatctacgttcatatgtatcataatattaatcatccacgttttgataaatctatctttagcttctgaaataacgtatttaaacaaaggagaaaaatatttagctacggcatcagacgcaataacattttttgtaaatgtaacgtatttagacgacagatcttcgttaaaaagttttccatctatgtagaatccatcggttgttaacaccattcccgcgtcagattgaataggagtttgaatagtttgttttggaaatagatccttcaataacttatagttgggtgggaaaaaatcgattttatcactagactctttcttttttactatcattacctcatgaactatttcttgaatgagtatatgtattttctttcctatatcggacgcgttcattggaaaatataccatgtcgttaactataagaatatttttatcctcgtttacaaactgaataatatcagatgtagttcgtaaacgaactatatcatcaccagcacaacatctaactatatgatatccactagtttcctttagccgtttattatcttgttccatattagcagtcattccatcatttaagaaggcgtcaaagataatagggagaaatgacattttggattctgttacgactttaccaaaattaaggatatacggacttactatctttttctcaacgtcaatttgatgaacacacgatgaaaatgtgcttctatgagattgatcatgtagaaaacaacaagggatacaatatttccgcatatcatgaaatatattaagaaatcccaccttattatatttccccaaaggatccatgcacgtaaacattatgccgttatcattaataaagacttctttctcatcggatctgtaaaagttgttactgatttttttcattccaggatctagataattaataatgatgggttttctattcttattctttgtattttggcatatcctagaccagtaaacagtttccactttggtaaaatcagcagacttttgaacgctattaaacatggcattaatggcaataactaaaaatgtaaaatatttttctatgttaggaatatggtttttcactttaatagatatatggtttttggccaaaatgatagatatttttttatccgaggatagtaaaatattattagtcgccgtctctataaaaatgaagctagtctcgatatccaattttattctagaattgataggagtcgccaaatgtaccttatacgttatatctcccttgatgcgttccatttgtgtatctatatcggacacaagatctgtaaatagttttacgttattaatcatcacggtatcgccgtcgctagataacgctaatgtaccatccaagtcccaaatggagagatttaactgttcatcgtttagaataaaatgattaccggtcatattaataaagtgttcatcgtatctagataacaacgacttataattaatgtccaagtcttgaactcgctgaatgatcttttttaacccagttagttttagattggtacgaaatatattgttaaactttgattctacagtaatgtccaaatctagttgtggaaatacttccatcaacattgtttcaaacttgataatattattatctacatcttcgtacgatccaaattccggaatagatgtatcgcacgctctggccacccagataaccaaaaagtcacacgctccaggatatacattgtataaaaagctatcgtttttaagtagggtttttttctgcgtgtatacgaagggattaaaaatagtattatcaacgtaactatattccaaattattcttatgagaatagataataatatcgtccttaatatctaacaaatttcctaaatatccctttaattgagtcattcgaagcgtcaatagaatatgtctcttaactatttccggctgttgtatatttaaatgacttcgtaaaaaataatatatgggcgacttctcatctatgtaatcatatggagtgagatatagggctcgttctacctcctgccccttacccacctgtaataccaattgcggacttactatatatcgcatatttatatcgtggggtaaagtgaaaatctactaccgatgatgtaagtcttacaatgttcgaaccagtaccagatcttaatttggaggcctccgtagaactaggggaggtaaatatagatcaaacaacacctatgataaaggagaatagcggttttatatcccgcagtagacgtctattcgcccatagatctaaggatgatgagagaaaactagcactacgattctttttacaaagactttattttttagatcatagagagattcattatttgttcagatgcgttgacgctgtaaaagacgtcactattaccaaaaaaaataacattatcgtggcgccttatatagcacttttaactatcgcatcaaaaggatgcaaacttacagaaacaatgattgaagcattctttccagaactatataatgaacatagtaagaaatttaaattcaactctcaagtatccatcatccaagaaaaactcggataccagtttggaaactatcacgtttatgattttgaaccgtattactctacagtagctctggctattcgagatgaacattcatctggcatttttaatatccgtcaagagagttatctggtaagttcattatctgaaataacatatagattttatctaattaatctaaaatctgatcttgttcaatggagtgctagtacgggcgctgtaattaatcaaatggtaaatactgtattgattacagtgtatgaaaagttacaactggtcatagaaaatgattcacaatttacatgttcattggctgtggaatcaaaacttccaataaaattacttaaagatagaaatgaattatttacaaaattcattaacgagttaaaaaagaccagttcattcaagataagcaaacgcgataaggatacgctactaaaatattttacttaggactggagttagaatttatagacgactcatttcgtttatcattgttactattattactattactatcattattagtgttggcattattagtattcttcttgtcatcttgttcagaaatatacagcaatgctatacctaatactaaatacattatcatgctcgcaatggctctaacaacaacgaaccaaaatgaatttggtcgtagcttttgttcacaaaaatacataaagaaatgtctacataaatctatggcgccattggctacttgaaatagcgccagtcctcctacagattttaatatagctgtataacatgacatttattcatcatcaaaagagacagagtcaccatctgtcatatttagattttttttcatgtgttcaaagtatcctctactcatttcattataatagtttatcatacttagaattttaggacggatcaatgagtaagacttgactagatcgtcagtagtaatttgtgcatcgtctattctgcatccgcttcgtcgaataatgtatagcatcgctttgagattctccatagctatcaagtctttatacaatgacatggaaatatctgtgaatactttatacttctccaacatcgatgccttaacatcatcgcctactttagcattgaaaatacgttctattgtgtagatggatgtagcaagatttttaaacaacaatgccatcttacacgatgattgcctcaagtctccaatcgtttgtttagaacgattagctacagagtccaatgcttggctgactagcatattattatctttagaaattgtattcttcaatgaggcgtttatcatatctgtgatttcgttagtcatattacagtctgactgggttgtaatgttatccaacatatcacctatggatacggtacacgtaccagcatttgtaataatcctatctaagatgttgtatggcattgcgcagaaaatatcttctcctgtaatatctccactctcgataaatctactcagattattcttaaatgccttattctctggagaaaagatatcagtgtccatcatttcattaatagtatacgcagaaaagataccacgagtatcaattctatccaagatacttatcggttccgagtcacagataatggtttcctctccttcgggagatcctgcatagaaatatctaggacaatagtttctatactgtctgtaactctgataatctctaaagtcactaactgataccatgaaattgagaagatcaaacgctgaagtaattaatttttctgcctcgtttttactacaactagttttcatcaatgtagtgacgatgtattgtttagttacttttggtctaatactgatgatagagatattattgcttcccataatggatcttctagtagtcaccttaaagcccattgatgcgaatagcagatagataaagtcttggtatgactcctttctaatatagtacggactacctttgtcacccaactttatacccacataagccataacaacctctttaatagccgtttcatgaggtttatcagccatgagcctgagtagttggaagaatctcatgaatcccgtctcagaaagtcctatatgcatgatagatttatctttcctgggaaactctcgtatagtcatagatgaaatactctttaaagtttctgaaataagattagtaacagtcttacctccgactactctaggtaacaaacaaactctaataggtgttttctctgcggagataatatcagaaaggatagagcaataagtagtattattgtgattataaagaccgaatacataacaggtagaatttataaacatcatgtcctgaaggtttttagacttgtattcctcgtaatccataccgtcccaaaacatggatttggtaactttgatagccgtagatctttgttccttcgccaacaggttaaagaaattaataaagaatttgttgtttctatttatgtccacaaattgcacgtttggaagcgccacggttacattcactgcagcattttgaggatcgcgagtatgaagtacgatgttattgtttactggtatatctggaaagaaatctaccagtctaggaataagagattgatatcgcatagaaatagtaaagtttataatctcatcatcgaagagcattttgttaccattgtaataaatatccactctgtcatatgtataaatgaagtactgttcaaacatgatgagatgtttatatgttggcatagtagtgagatcgacgtttggtaatggcaatgtattaagattaactccataatgtctagcagcatctgcgatgttataagcgtcgtcaaagcggggtcgatcttgtattgttatatattgtctaacacctataagattatcaaaatcttgtctgcttaatacaccgttaacaatttttgccttgaattcttttattggtgcattaataacatccttatagaggatgttaaacaaataagtgttatcaaagttaagatctggatatttcttttctgctagaacatccattgagtcggagccatctggtttaatataaccaccgataaatctagctctgtattctgtatccgtcaatctaatattaagaaggtgttgagtgaaaggtggaagatcgtaaaagctgtgagtattaatgataggattagtttccgaactaatgttaattggggtattaataatatctatatttccagcgttaagtgtaacattaaacagttttaattcacgtgacgtggtatcaattaaataattaatgcccaatttggatatagcagcctgaagctcatcttgtttagttacggatcctaatgagttattaagcaatatatcgaacggatgaacgaaggttgttttaagttggtcacatactttgtaatctagacatagatgcggaagaacggtagaaactatacgaaataaatattcagagtcctctaattgatcaagagtaactattgacttaataggcatcatttatttagtattaaatgacgaccgtaccagtgacggatatacaaaacgatttaattacagagttttcagaagataattatccatctaacaaaaattatgaaataactcttcgtcaaatgtctattctaactcacgttaacaacgtggtagatagagaacataatgccgccgtagtgtcatctccagaggaaatatcctcacaacttaatgaagatctatttccagatgatgattcaccggccactattatcgaacgagtacaacctcatactactattattgacgatactccacctcctacgtttcgtagagagttattaatatcggaacaacgtcaacaacgagaaaaaagatttaatattacagtatcgaaaaatgctgaagcaataatggaatctagatctatgataacttctatgccaacacaaacaccatccttgggagtagtttatgataaagataaaagaattcagatgttagaggatgaagtggttaatcttagaaatcaacgatctaatacaaaatcatctgataatttagataattttaccaaaatactatttggtaagactccgtacaaatcaacagaagttaataagcgtatagccatcgttaattatgcaaatttgaacgggtcccccttatcagtcgaggacttggatgtttgttcggaggatgaaatagatagaatctataaaacgattaaacaatatcacgaaagtagaaaacgaaaaattatcgtcactaacgtgattattattgtcataaacattatcgagcaggcattgctaaaactcggatttgaagaaatcaaaggactgagtaccgatatcacttcagaaattatcgatgtggagatcggagatgactgcgatgctgtagcatctaaactaggaatcggtaacagtccggttcttaatattgtattgtttatactcaagatattcgttaaacgaattaaaattatttaatttaatacattcccatatccagacaacaatcgtctggattaatctgttcctgtcgtctcataccggacgacatattaatctttttattagtgggcatctttttagatggtttctttttcccagcattaactgagtcgatacctagaagatcgtgattgatctctccgaccattccacgaacttctaattggccgtctctgacggtaccataaactattttaccagcattagtaacagcttggacaatctgaccatccatcgcattgtacgatgtagtagtaactgttgttctacgtctaggagcaccagaagtatttttggagcccttggatgttgatgtagaagaagacgaggattttgattttggtttacatgtaatacattttgaactctttgattttgtatcacatgcgccggcagtcacatctgtttgagaattaagattattgttgcctcctttgacggctgcatctccaccgatttgcgctagtagatttttaagctgtggtgtaatcttattaactgtttcgatataatcatcgtaactgcttctaacggctaaattttttttatccgccatttagaagctaaaaatatttttatttatgcagaagatttaactagattatacaatgaactaatatgatccttttccagattatttacaaacttggtattttttggttctggaggaggcgaatttaaattcggacttggattcggattttgtaagttcttgatcttattatacatcgagtataggatggcgacagtaactgctacacaaataccgatcaaaagaagaataccaatcatttattgacaataacttcactattgatcaagtatgcaatatatcatcttttcactaaataagtagtaataatgattcaacaatgtcgagatatatggacgataataatttagttcatggaaatatcgctatgattggtgtgaatgactccgctaactctgtggggtgcgcagtgctttccccacatagaataaattagcattccgactgtgataataataccaagtataaacgccataatactcaatactttccatgtacgagtgggactggtagacttactaaagtcaataaaggcgaagatacacgaaagaatcaaaagaatgattccagcgattagcacgccggaaaaataatttccaatcataagcatcatgtccatttaactaataaaaattttaaatcgccgaatgaacaaagtggaatataaaccatataaaaacaatagtttgtactgcaaaaataatatctatttttgttttcgaagatatggtaaaattaaatagtagtacacagcatgttataactaacagcagcaacggctcgtaattacttatcatttactagacgaaaaggtggtgggatattttcttgctcaaataatacgaatatatcacccatccattttatgcgatgtttatatactctaatctttaatagatctatagacgacgggtttaccaacaatatagattttatcgattcatctaatttaaacccttccttaaacgtgaatgatctattatctggcataacgatgaccctacctgatgaatcggacaatgtactgggccatgtagaataaattatcaacgaattatcgtctacgaacatttatatcatttgttttaattttaggacgcgaataaatggatataaaatagaaaataacagatattacaaccagtgttatggccgcgcccaaccaggtaggcagttttattttatcttttactacaggttctcctggatgtacgtcaccaacggcggacgtagttctagtacaattagacgtaagttccgcttgggaattttttaacgctaaagagttaacgttaatcgtgcacccaacgtatttacatctagttcgttgaacatcttgattataatataaccattttctatctctagattcgtcagtgcactcatgtaaccaacataccctaggtcctaaatatttatctccggaattagattttggataattcgcgcaccaacaatttctatttcctttatgatcgttacaaaagacgtataatgccgtatccccaaaagtaaaataatcaggacgaataattctaataaactcagaacaatatctcgcatccatatgtttggagcaaatatcggaataagtagacatagccggtttccgttttgcacgtaaccattctaaacaattggggtttccaggatcgtttctacaaaatccagtcatgaaatcgtcacaatgttctgtcttgtaattattattaaatatttttggacagtgtttggtatttgtcttagaacaacattttgccacgctatcactatcgcccaggagataatccttttttataaaatgacatcgttgcccggatgctatataatcagtagcgtgttttaaatccttaatatattcaggagttacctcgttctgataatagattaatgatccaggacgaaatttgaaagaactacatggttctccatgaattaatacatattgtttagcaaattcaggaactataaaactactacaatgatctatcgacataccatctatcaaacaaaacttgggtttaatttctcccggagatgtttcataatagtacgtataactttcttctgcaaacttaacagctctattatattcaggataattaaaacctaattccatatatttgtctcgtatatctgctattcctggtgctattttgattctattaagagtaacagctgcccccattcttaataatcgtcagtatttaaactgttaaatgttggtatatcaacatctaccttatttcccgcagtataaggtttgttgcaggtatactgttcaggaatggttacatttatacttcttctatagtcctgtctttcgatgttcatcacatatgcaaagaacagaataaacaaaataatgtaagaaataatattaaatatctgtgaattcgtaaatacattgattgccataataattacagcagctacaatacacacaatagacattcccacagtgttgccattacctccacgatacatttgagttactaagcaataggtaataactaagctagtaagaggcaatagaaaagatgagataaatatcatcaatatagagattagaggagggctatatagagccaagacgaacaaaatcaaaccgagtaacgttctaacatcattatttttgaagattcccaaataatcattcattcctccataatcgttttgcatcatacctccatctttaggcataaacgattgctgctgttcctctgtaaataaatctttatcaagcactccagcacccgcagagaagtcgtcaagcatattgtaatatcttaaataactcatttatatattaaaaaatgtcactattaaagatggagtataatctttatgccgaactaaaaaaaatgacttgtggtcaacccctaagtctttttaacgaagacggggatttcgtagaagttgaaccgggatcatcctttaagtttctgatacctaagggattttacgcctctccttccgtaaagacgagtctagtattcgagacattaacaacgaccgataataaaatcactagtatcaatccaacaaatgcgccaaagttatatcctcttcaacgcaaagtcgtatctgaagtagtttctaatatgaggaaaatgatcgaatcaaaacgtcctctatacattactcttcacttggcgtgtggatttggtaagactattaccacgtgttatcttatggctacacacggtagaaaaaccgtcatttgcgtacccaataaaatgttaatacatcaatggaagacacaggtagaggcagtcggattggaacataagatatccatagatggagtaagtagtctattaaaggaactaaagactcaaagtccggatgtattaatagtagtcagtagacatctgacaaacgatgccttttgtaaatatatcaataagcattatgatttgttcatcttggatgaatcacatacgtataatctgatgaacaatacagcagttacaagatttttagcgtattatcctccgatgatgtgttattttttaactgctacacctagaccatctaaccgaatttattgtaacagtattattaatattgccaagttatccaatctaaaaaaaactatctatgcagtagatagtttttttgagccatattccacagataatattagacatatggtaaaacgactagatggaccatctaataaatatcatatatataccgagaagttattatctgtagacgagcctagaaatcaacttattcttgataccctggtagaagaattcaagtcaggaactattaatcgcattttagttattactaaactacgtgaacatatggtattattctacaaacgattattagattttttcggaccagaggttgtatttataggagacgcccaaaatagacgtactccagatatggtcaaatcaatcaaggaactaaatagatttatattcgtatccaccttattttattccggtactggtttagatattcctagtttggattcgttgttcatttgctcggcagtaatcaacaatatgcaaatagagcaattactagggagggtatgtcgagaaacagaactattagataggacggtatatgtatttcctaacacatccatcaaagaaataaagtacatgataggaaatttcatgcaacgaattattagtctgtctgtagataaactaggatttaaacaaaaaagttatcggaaacatcaagaatccgatcccacttctgcatgtacaacatcatccagagaagaacgtgtattaaatagaatatttaactcgcaaaatcgttaagaagtttaagcgacgatccgcatgctgcgcaggccagtgtattacccctcatagtattaatataatccaatgatacttttgtgatgtcggaaatcttaaccaatttagactgacaggcagaacacgtcatgcaatcatcatcgtcatcgataactgtagtcttgggcttctttttgcgactcttcattccggaacgcacattggtgctatccatttaggtagtaaaaaataagtcagaatatgccctataacacgatcgtgcaaaacctggtatatcgtctctatctttatcacaatatagtgtatcgacatttttattattattgacctcgtttatcttggaacatggaatgggaacatttttgttatcaacggccatctttgccttaattccagatgttgtaaaattataactaaacagtctatcatcgacacaaatgaaattcttgtttagacgtttgtagtttacgtatgcggctcgttcgcgtctcattttttcagatattgcaggtactataatattaaaaataagaatgaaataacataggattaaaaataaagttatcatgacttctagcgctgatttaactaacttaaaagaattacttagtctgtacaaaagtttgagattttcagattctgcggctatagaaaagtataattctttggtagaatggggaacatctacttactggaaaataggcgtgcaaaaggtagctaatgtcgagacgtcaatatctgattattatgatgaggtaaaaaataaaccgtttaatattgatccgggctattacattttcttaccggtatattttgggagcgtctttatttattcgaagggtaaaaatatggtagaacttggatctggaaactcttttcaaataccagatgatatgcgaagtgcgtgtaacaaagtattagacagcgataacggaatagactttctgagatttgttttgttaaacaatagatggataatggaagatgctatatcaaaatatcagtctccagttaatatatttaaactagctagtgagtacggattaaacatacccaaatatttagaaattgaaatagaggaagacacattatttgacgacgagttatactctattatagaacgctctttcgatgataaatttccaaaaatatccatatcgtatattaagttgggagaacttagacggcaagttgtagactttttcaaattctcattcatgtatattgagtccatcaaggtagatcgtataggagataatatttttattcctagcgttataacaaaatcaggaaaaaagatattagtaaaagatgtagaccatttaatacgatccaaggttagagaacatacatttgtaaaagtaaaaaagaaaaacacattttccattttatacgactatgatggaaacggaacagaaactagaggagaagtaataaaacgaattatagacactataggacgagactattatgttaacggaaagtatttctctaaggttggtagtgcaggcttaaagcaattgactaataaattagatattaatgagtgcgcaactgtcgatgagttagttgatgagattaataaatccggaactgtaaaacgaaaaataaaaaaccaatcagcatttgatttaagcagagaatgtttgggatatccagaagcggattttataacgttagttaataacatgcggttcaaaatagaaaattgtaaggttgtaaatttcaatattgaaaatactaattgtttaaataacccgagtattgaaactatatatggaaactttaaccagttcgtctcaatctttaatgtcgtcaccgatgtcaaaaaaagattattcgagtgaaataatatgcgcctttgatataggtgcaaaaaatcctgccagaactgttttagaagtcaaggataactccgttagggtattggatatatcaaaattagactggagttctgattgggaaaggcgcatagctaaagatttgtcacaatatgaatacactacagttcttctagaacgtcagcctagaaggtcgccgtatgttaaatttatctattttattaaaggctttttatatcatacatcggctgccaaagttatttgcgtctcgcctgtcatgtctggtaattcatatagagatcgaaaaaagagatcggtcgaagcatttcttgattggatggacacattcggattgcgagactccgttccggatagacgcaaattagacgatgtagcggatagtttcaatttggctatgagatacgtattagataaatggaatactaattatacaccttataataggtgtaaatctagaaattacataaaaaaaatgtaataacgttagtaacgccattatggataatctatttacctttctacatgaaatagaagatagatatgccagaactatttttaactttcatctaataagttgcgatgaaataggagatatatatggtcttatgaaagaacgcatttcctcagaggatatgtttgataatatagtgtataataaagatatacatcctgccattaagaaactagtgtattgcgacatccaacttactaaacacattattaatcagaatacgtatccggtatttaacgattcttcacaagtgaaatgttgtcattatttcgacataaactcagataatagcaatattagctctcgtacagtagagatatttgagagggaaaagtcatctcttgtatcatatattaaaactaccaataagaagagaaaggtcaattacggcgaaataaagaaaactgttcatggaggcactaatgcaaattacttttccggtaaaaagtctgacgagtatctgagtactacagttagatccaacattaatcaaccttggatcaaaaccatctctaagaggatgagagttgatatcattaatcactctatagtaacgcgtggaaaaagctctatattacaaactatagaaattatttttactaatagaacatgtgtgaaaatattcaaggattctactatgcacattattctatccaaggacaaggatgaaaaggggtgtatacacatgattgacaaattattctatgtctattataatttatttctgttgttcgaagatatcatccaaaacgagtactttaaagaagtagctaatgttgtaaaccacgtactcacggctacggcattagatgagaaattattcctaattaagaaaatggctgaacacgatgtttatggagttagcaatttcaaaatagggatgtttaacctgacatttattaagtcgttggatcataccgttttcccctctctgttagatgaggatagcaaaataaagttttttaaggggaaaaagctcaatattgtagcattacgatctctggaggattgtataaattacgtgactaaatccgagaatatgatagaaatgatgaaggaaagatcgactattttaaatagcatagatatagaaacggaatcggtagatcgtctaaaagaattgcttctaaaatgaaaaaaaacactaattcagaaatggatcaacgactagggtataagtttttggtgcctgatcctaaagccggagttttttatagaccgttacatttccaatatgtatcgtattctaattttatattgcatcgattgcatgaaatcttgaccgtcaagcggccactcttatcgtttaagaataatacagaacgaattatgatagaaattagcaatgttaaagtgactcctccagattactcacctataatcgcgagtattaaaggtaagagttatgacgcattagccacgttcactgtaaatatctttaaagaggtaatgaccaaagagggtatatccatcactaaaataagtagttatgagggaaaagattctcatttgataaaaattccgctactaataggatacgggaataaaaatccacttgatacagccaagtatcttgttcctaatgtcataggtggagtctttatcaataaacaatctgtcgaaaaagtaggaattaatctagtagaaaagattacaacatggccaaaatttagggttgttaagccaaactcattcactttctcgttttcctccgtatcccctcctaatgtattaccgacaagatatcgccattacaagatatctctggatatatcacaattggaagcgttgaatatatcatcgacaaagacatttataacggtcaatattgttttgctgtctcaatatttatctagagtgagtctagaattcattagacgtagtttatcatacgatatgcctccagaagttgtctatctagtaaacgcgataatagatagtgctaaacgaattactgaatctattactgactttaatattgatacatacattaatgacctggtggaagctgaacacattaaacaaaaatctcagttaacgattaacgagttcaaatatgaaatgctgcataactttttacctcatatgaactatacacccgatcaactaaagggattttatatgatatctttactaagaaagtttctctactgtatcttccacacttctagatatccagatagagattcgatggtttgtcatcgcatcctaacgtacggcaaatattttgagacgttggcacatgatgaattagagaattacataggcaacatccgaaacgatatcatgaacaatcacaagaacagaggcacttacgcggtaaacattcatgtactaacaactcccggacttaatcacgcgttttctagcttattgagtggaaagttcaaaaagtcagacggtagttatcgaacacatcctcactattcatggatgcagaatatttctattcctaggagtgttggattttatccggatcaagtaaagatttcaaagatgttttctgtcagaaaataccatccaagtcaatatctttacttttgttcatcagacgttccggaaagaggtcctcaggtaggtttagtatctcaattgtctgtcttgagttccattacaaatatactaacgtctgagtatttggatttggaaaagaaaatttgtgagtatatcagatcatattataaagatgatataagttactttgaaacaggatttccaatcactatagaaaatgctctagtcgcatctcttaatccaaatatgatatgtgattttgtaactgactttagacgtagaaaacggatgggattcttcggtaacttggaggtaggtattactttagttagggatcacatgaatgaaattcgcattaatattggagcgggaagattagtcagaccattcttggttgtggataacggagagctcatgatggatgtgtgtccggagttagaaagcagattagacgacatgacattctctgacattcagaaagagtttccgcatgtcatcgaaatggtagatatagaacaatttacttttagtaacgtatgtgaatcggttcaaaaatttagaatgatgtcaaaggatgaaagaaagcaatacgatttatgtgactttcctgccgaatttagagatggatatgtagcatcttcactagtgggaatcaatcacaattctggacccagagctattcttggatgtgctcaagctaaacaagctatctcttgtctgagttcggatatacgaaataaaatagacaatggaattcatttgatgtatccagagaggccaatcgtgattagtaaggctttagaaacttcaaagattgcggctaattgcttcggccaacatgttactatagcattaatgtcgtacaaaggtatcaatcaagaggatggaattatcatcaaaaaacaatttattcagagaggcggtctcgatattgttacagccaagaaacatcaagtagaaattccattggaaaactttaataacaaagaaagagataggtctaacgcctattcaaaattagaaagtaatggattagttagactgaatgctttcttggaatccggagacgctatggcacgaaatatctcatcaagaactcttgaagatgattttgctagagataatcagattagcttcgatgtttccgagaaatataccgatatgtacaaatctcgcgttgaacgagtacaagtagaacttactgacaaagttaaggtacgagtattaaccatgaaagaaagaagacccattctaggagacaaatttaccactagaacgagtcaaaagggaacagtcgcgtatgtcgcggatgaaacggaacttccatacgacgaaaatggtatcacaccagatgtcattattaattctacatccatcttctctagaaaaactatatctatgttgatagaagttattttaacagccgcatattctgctaagccgtacaacaataagggagaaaaccgacctgtctgttttcctagtagtaacgaaacatccatcgatacatatatgcaattcgctaaacaatgttatgagcattcaaatccgaaattgtccgatgaagaattatcggataaaatcttttgtgaaaagattctctatgatcctgaaacggataagccttatgcatccaaagtattttttggaccaatttattacttgcgtctgaggcatttaactcaggacaaggcaaccgttagatgtagaggtaaaaagacgaagctcattagacaggcgaatgagggacgaaaacgtggaggaggtatcaagttcggagaaatggagagagactgtttaatagcgcatggtgcagccaatactattacagaagttttgaaagattcggaagaagattatcaagatgtgtatgtttgtgaaaattgtggagacatagcagcacaaatcaagggtattaatacatgtcttagatgttcaaaacttaatctctctcctctcttaacaaaaattgataccacgcacgtatctaaagtatttcttactcaaatgaacgccagaggcgtaaaagtcaaattagatttcgaacgaaggcctccttcgttttataaaccattagataaagttgatctcaagccgtcttttctggtgtaatattctagtttggtagtagatacatatcaatatcatcaaattcgagatccgaattataaaatgggcgtggattgttaactatagaatcggacgtctgatattcgaaaatctgtggagtttcaggttttggtggaggtgtaactgctacttgggatactgaagtctgatattcagaaagctgtggatgttctggttcggcatccaccgatggtgtcacatcactaatcggttcggtaacgtctgtggatggaggtgctacttctacagaacctgtagcctcagttgtcaacggagatacatttttaatgcgagaaaatgtataatttggtaatggtttcttatgtggatctgaagaagaggtaagatatctactagaaagataccgatcacgttctagttctcttttgtagaacttaactttttctttctccgcatctagttgatattccaacctcttcacgttactacgttcagattccaattcacgttcgcatgggttacctccgcagtttttacgagcgatttcacgttcagccttcatgcgtctctccctctctctatcgagtttatcagagcagtctttctgaaggcgatcgaactccataaatttctccaacgctttgattgtttccatagatttccgaagttcagcttttaggactgtgattctttttctttcgaattcacagctggatgtacaaccgtttccattaccgccatctctaagtttcttttctagatcggcaacatttcatccccatgccttttacattcctcgagtctactgtcgtcgaaatatcgttccagctccttttcgacatcaataactttagcacgttgtctctcaagctctcttttgtagttatctgattccctggcacgtttaagatcttcatgcaattgagtcagctcttaacttcctctcttgcttcttcgtcatagtacgcgcaatcactgtgagatccattgttaccacgtctacactcggcgagctcgcgtttaagagattcaatttcccgtttgtattggtccatgtttccattgctaccaccattagatttacaggctgctagttgtcgttcgagatcagaaatacgggttttcttggaattgatttcgtcgatgtacttggcatcgaaacacttattaagttctttttccaattctacgattttatttctttcgcgagtcaattccctcctgtagtaactatctgttttgtcagattcacgctctctacgtagactttcttgcaagttactaatttgttccctagcacgtccgagtttagttttatatgctgaatagagttctgattcatcctttgagcagatctctagcgatcgtttaagattcctaattctagtctttagcctatttacctcctcagaagatgttccgttaccgttgcgtttacactcgttaagctgtctatcaagatccatgattctatctctaagacgttgcatctctctttccatatcagcattgctttcattattacgtctgcagtcactcaactgtctttcaatatctgagattctatctctaagacgtcgcatctctctctgtttcggcattggtttcattattacgtttacagtcgttcaactgtctttcaagatctgatattctagattggagtctgctaatctctgtagcattttcacggcattcactcagttgtctttcaagatctgaaattttagattggagtctgctaatctctgtaagatttcctcctccgctctcgatgcagtcggtcaacttattctctagttctctaatacgcgaacgcagtgcatcaacttcttgcgtgtcttcctggttgcgtgtacattcatcgagtctagattcgagatctctaacgcgtcgtcgttcttcctcaagttctctgcgtactacagaaagcgtgtccttatcttgttgatatttagcaatttctgattctagagtactgattttgcttacgtagttactaatatttgtcttggccttatcaagatcctccttgtatttgtcgcattccttgatatccctacgaagtctggacagttcccattcgacattacgacgtttatcgatttcagctcggagatcgtcatcgcgttgttttagccacatacgactgagttcaagttctcgttgacaagatccatctacttttccattcctaatagtatccagttccttttctagttctgaacgcatttctcgttccctatcaagcgattctctcaattctcggatagtcttcttatcaatttctaataaatctgaaccatcatctgtcccattttgaatatccctgtgttctttgatctcttttgtaagtcggtcgattctttcggttttataaacagaatccctttccaaagtcctaatcttactgagtttatcactaagttctgcattcaattcggtgagttttctcttggcttcttccaactctgttttaaactctccactatttccgcattcttcctcgcatttatctaaccattcaattagtttattaataactagttggtaatcagcgattcctatagccgttcttgtaattgtgggaacataattaggatcttctaatggattgtatggcttgatagcatcatctttatcattattagggggatggacaaccttaattggttggtcctcatctcctccagtagcgtgtggttcttcaataccagtgttagtaataggcttaggcaaatgcttgtcgtacgcgggcacttcctcatccatcaagtatttataatcgggttctacttcagaatattcttttctaagagacgcgacttcgggagttagtagaagaactctgtttctgtatctatcaacgctggaatcaatactcaagttaaggatagcgaatacctcatcgtcatcatccgtatcttctgaaacaccatcatatgacatttcatgaagtctaacgtattgataaatagaatcagatttagtattaaacagatccttaacctttttagtaaacgcatatgtatattttagatctccagatttcataatatgatcacatgccttaaatgtcagtgcttccatgatataatctggaacactaatgggtgacgaaaaagatacagcaccatatgctacgttgataaataaatctgaaccactaagtagataatgattaatgttaagaaagaggaaatattcagtgtataggtatgtcttggcgtcatatcttgtactaaacacgctaaacagtttgttaatgtgatcaatttccaatagattaattagagcagcgggaataccaacaaacatattaccacatccgtattttctatgaatatcacatatcatgttaaaaaatcttgatagaagagcgaatatctcgtctgacttaatgagtcgtagttcagcagcaacataagtcataactgtaaatagaacatactttcctgtagtgttgattctagactccacatcaacaccattattaaaaatagttttatatacatctttaatctgctctccgttaatcgtcgaacgttctagtatacggaaacactttgatttcttatctgtagttaatgacttagtgatatcacgaagaatattacgaattacatttcttgtttttcttgagagacctgattcagaactcaactcatcgttccatagtttttctacctcagtggcgaaatctttggagtgcttggtacatttttcaataaggttcgtgacctccatttattataaaaaatttattcaaaacttaactacaatcgggtaattataaaatcgtagatctcccatgtggcggaatactaccatctatcgcatgtggatggacagtaggtaatggccatgggaacagtaatgtttgcatatttatctttcttgccagtattactgcatattgtcccaatgtttcgatgtgatgttctaacctatcaactgccgctgtatcacaacaatagtgtccgatgaaattaagattatgatccaatgtgtttaatatatgattatcaagtcttatacgatccgcgtcttttttgacaggatcaggttcttctacaggaagaagtttcggcctcttatgatattcatgtctgggaaacggtggtctagggtgaggctccggtatcggagtgggttttggattataatcatcatcgtctatgacatcatcttcgacttcgatatttattttgctatcttgatgatgtcctgtatcagttgcattttcagcactcgactgaatattagcgcattcattgtctattattaccatatttctaaacccaaaatgtatgtgttgaacatcagtactatcgttgatgagtcttatagcatgaattcgcttatcgttatcgggtttatcttctgtcaccttagcaattccttttttattaaactctacataatcatatccatttctattgtttgttctaatataaacgagtatagcatcattgctaaatttttcaatagtatcaaaaacagaatatcctaaaccatataatatatattcaggaacactcaaactaaatgtccaggattctcctaaatacgtaaactttaatagtgcgaaatcattcaaaaatctaccacttatagatagatagtacataaatgcgtatagtagtctacctatctctttattatgaaaaccggcattacgatcatatatgtcgtgatatacctgtgatccgtttacgttaaaccataaatacatgggtgatcctataaacatgaatttatttctaattctcagagctatagttaattgaccgtgtaatatttgcttacatgcatacttgatacgcttattaataagatttttatcattgctcgttatttcagaatcgtatatataaggagtaccatcgtgattcttaccagatattatacaaaatactatatataaaatatattgacccacgttagtaatcatataaatgtttaacgttttaaattttgtattcaatgatccattatcatacgctatcatggtcttgtaatattcattctttaaaatataatattgtgttagccattgcattggagctcctaatggagattttctattctcatccattttaggataggctttcataaagtccctaataacttcgtgaataatgtttctatgttttctactgatgcatgtatttgcttcgatttttttatcccatgtttcatctatcatagatttaaacgcagtaatgctcgcaacattaacatcttgaaccgttggtacaattccgttccataaatttataatgttcgccatttatataactcattttttgaatatacttttaattaacaaaagagttaagttactcatatggacgccgtccagtctgaacatcaatctttttagccagagatatcatagccgctcttagagtttcagcgtgattttccaacctaaatagaacttcatcgttgcgtttacaacacttttctatttgttcaaactttgttgttacattagtaatctttttttccaaattagttagccgttgtttgagagtttcctcattgtcgtcttcatcggctttaacaattgcttcgcgtttagcctctggctttttagcagcctttgtagaaaaaaattcagttgctggaattgcaagatcgtcatctccggggaaaagagttccgtccatttaaagtacagattttagaaactgacactctgcgttatttatatttggtacaacacatggattataaatattgatgttaataacatcagaaaatgtaaagtctatacattgttgcatcgtgttaaattttctaatggatctagtattattgggtccaacttctgcctgaaatccaaatatggaagcggatacaaaaccgtttcctggataaaccacacatctccacttttgctttacatcagaaattgtgtcgttgacatcttgaactctcctatctaatgccggtgttccacctatagattttgaatattcgaatgctgcatgagtagcattaaattccttaatattgccataattttcatatattgagtaaccctggataaaaagtaaacacaccgcagccgtcgctaccacaataaaaaaaattgatagagagttcatttataatctattagaagctgacaaaatttttttacacgcatcagacaatgctttaataaatagttcaacatctacttttgtcatatcgaaccgatggtatgattctaacctagaattacatccgaaaaagttgactatgttcatagtcattaagtcattaacaaacaacattccagactctggattataagacgatactgtttcgtcacaattacctaccttaatcatgtgattatgaatattggctattagagcaccttctaagaaatctataatatctttgaaacacgatttaaaatcaaaccacgaatatacttctacgaagaaagttagtttacccataggagaaataactataaatggagatctaaatacaaaatccggatctatgatagttttaacattattatattctctattaaatacctccacatctaaaaatgttaattttgaaactatgtcttcgtttattaccgtacctgaactaaacgctataagctctattgtttgagaactctttaaacgatattcttgaaatacatgtaacaaagtttcctttaactcggtcggtttatctaccatagttacagaatttgtatccttatctataatataataatcaaaatcgtataaagttatataattatcgcgttcagattgggatcttttcaaatagactaaaaaccccatttctctagtaagtatcttatgtatatgtttgtaaaatatcttcatggtgggaatatgctctaccgcagttagccattcctcattgacagcggtagatgtattagacaaaactattccaatgtttaacaagggccattttacgagattattaaatccttgtttgataaatgtagccaatgagggttcgagttcaacgacgattgaattctcttcccgcggatgctgcatgatgaacgacgggatgttgttcgattgatttggaattctttttcgactttttgtttatattaaatattttaaaatttatagcggatagcaattcatgtaccacggataatgtagacgcgtattgcgcatcgatatctttattattagataaatttatcaataaatgtgagaagtttgcctcgttaaggtcttccatttaaatattatataaacatttgtgtttgtaacttattcgtcttttatggaatagttttttactagtaaagctgcaattacacactttgtccgtaaaacataaatataaacaccagcttttatcaatcgttccaaaaagtcgacggcggacatttttaacatggcatctattttaaatacacttaggtttttggaaaaaacatcattttataattgtaacgattcaataactaaagaaaagattaagattaaacataagggaatgtcatttgtattttataagccaaagcattctaccgttgttaaatacttgtctggaggaggtatatatcatgatgatttggttgtattggggaaggtaacaattaataatctaaagatgatgctattttacatggatttatcatatcatggagtgacaagtagtggagcaatttacaaattgggatcgtctatcgatagactttctctaaataggactattgttacaaaagttaataattatgatgatacattttttgacgacgatgattgatcgctattgcacaattttgtttttgtactttctaatatagtgtttaggttctttttcatatgagaatattgatttactaaaatatctatgtttaacttttgttctatgacgtccttatcggcggtatcggtacatatacgtaattcaccttcacaaaatacggagtcttcgataataatagccaatcgattattggatctagctgtctgtatcatattcaacatgtttaatatatcctttcgtttcccctttacaggcatcgatcgtagcatattttccgcgtctgatatggaaatgttaaaactacaaaaatgcgtaatgttagcccgtcctaatattggtacgtgtctataagtttggcatagtagaataatagacgtgtttaaatgccttccaaagtttaagaattctattagagtattgcattttgatagtttatcgcctacatcatcaaaaataagtaaaaagtgtgctgattttttatgattttgtgcgacagcaatacatttttctatgttacttttagttcgtatcagattatattctagagattcctgactactaacgaaattaatatgatttggccaaatgtatccatcataatctgggttataaacgggtgtaaacaagaatatatgtttatattttttaactagtgtagaaaacagagatagtaaatagatagtttttccagatccagatcctcctgttaaaaccattctaaacggcatttttaataaattttctcttgaaaattgtttttcttggaaacaattcataattatatttacagttactaaattaatttgataataaatcaaaatatggaaaactaaggttgttagtagggaggagaacaaagaaggcacatcgtgatataaataacatttattatcatgatgacaccagaaaacgacgaagagcagacatctgtgttctccgctactgtttacggagacaaaattcagggaaagaataaacgcaaacgcgtgattggtctatgtattagaatatctatggttatttcactactatctatgattaccatgtccgcgtttctcatagtgcgcctaaatcaatgcatgtctgctaacgaggctgctattactgacgccgctgttgccgttgctgctgcatcatctactcatagaaaggttgcgtctagcactacacaatatgatcacaaagaaagctgtaatggtttatattaccagggttcttgttatatattacattcagactaccagttattctcggatgctaaagcaaattgcactgcggaatcatcaacactacccaataaatccgatgtcttgactacctggctcattgattatgttgaggatacatggggatctgatggtaatccaattacaaaaactacatccgattatcaagattctgatgtatcacaagaagttagaaagtatttttgtgttaaaacaatgaactaatatttatttttgtacattaataaatgaaatcgcttaatagacaaactgtaagtaggtttaagaagttgtcggtgccggccgctataatgatgatactctcaaccattattagtggcataggaacatttctgcattacaaagaagaactgatgcctagtgcttgcgccaatggatggatacaatacgataaacattgttatttagatactaacattaaaatgtctacagataatgcggtttatcagtgtcgtaaattacgagctagattgcctagacctgatactagacatctgagagtattgtttagtattttttataaagattattgggtaagtttaaaaaagaccaatgataaatggttagatattaataatgataaagatatagatattagtaaattaacaaattttaaacaactaaacagtacgacggatgctgaagcgtgttatatatacaagtctggaaaactggttaaaacagtatgtaaaagtactcaatctgtactatgtgttaaaaaattctacaagtgacaacaaaaaatgaattaataataagtcgttaacgtacgccgccatggacgccgcgtttgttattactccaatgggtgtgttgactataacagatacattgtatgatgatctcgatatctcaatcatggactttataggaccatacattataggtaacataaaaactgtccaaatagatgtacgggatataaaatattccgacatgcaaaaatgctactttagctataagggtaaaatagttcctcaggattctaatgatttggctagattcaacatttatagcatttgtgccgcatacagatcaaaaaataccatcatcatagcatgcgactatgatatcatgttagatatagaagataaacatcagccattttatctattcccatctattgatgtttttaacgctacaatcatagaagcgtataacctgtatacagctggagattatcatctaatcatcaatccttcagataatctgaaaatgaaattgtcgtttaattcttcattctgcatatcagacggcaatggatggatcataattgatgggaaatgcaatagtaattttttatcataaaagttgtaaagtaaataataaaacaataaatattgaactagtagtacgtatattgagcaatcagaaatgatgctggtacctcttatcacggtgaccgtagttgcgggaacaatattagtatgttatatattatatatttgtaggaaaaagatacgtactgtctataatgacaataaaattatcatgacaaaattaaaaaagataaagagttctaattccagcaaatctagtaaatcaactgatagcgaatcagactgggaggatcactgtagtgctatggaacaaaacaatgacgtagataatatttctaggaatgagatattggacgatgatagcttcgctggtagtttaatatgggataacgaatccaatgttatggcgcctagcacagaacacatttacgatagtgttgctggaagcacgctgctaataaataatgatcgtaatgaacagactatttatcagaacactacagtagtaattaatgaaacggagactgttgaagtacttaatgaagataccaaacagaatcctaactattcatccaatcctttcgtaaattataataaaaccagtatttgtagcaagtcaaatccgtttattacagaacttaacaataaatttagtgagaataatccgtttagacgagcacatagcgatgattatcttaataagcaagaacaagatcatgaacacgatgatatagaatcatcggtcgtatcattggtgtgattagtttcctttttataaaattgaagtaatatttagtattattgctgccgtcacgttgtacaaatggagatattccctgtattcggcatttctaaaattagcaattttattgctaataatgactgtagatattatatagatacagaacatcaaaaaattatatctgatgagatcaatagacagatggatgaaacggtacttcttaccaacatcttaagcgtagaagttgtaaatgacaatgagatgtaccatcttattcctcatagattatcgacgattatactctgtattagttctgtcggaggatgtgttatctctatagataatgacatcaatggcaaaaatattctaacctttcccattgatcatgctgtaatcatatccccactgagtaaatgtgtcgtagttagcaagggtcctacaaccatattggttgttaaagcggatatacctagcaaacgattggtaacatcgtttacaaacgacatactatatgtaaacaatctgtcactgattaattatttgccgttgtctgtattcattattagacgagtcaccgactatttggatagacacatatgcgatcagatatttgctaataataagtggtattcccttataaccatcgacgataagcaatatcctattccatcaaactgtataggtatgtcctctgccaagtacataaattctagcatcgagcaagatactttaatccatgtttgtaacctcgagcatccgttcgactcagtatacaaaaaaatgcagtcgtacaattctctacctatcaaggaacaaatattgtacggtagaattgataatataaatatgagcattagtatttctgtggattaatagatttctagtatggggatcattaatcatctctaatctctaaatacctcataaaacgaaaaaaaagctattatcaaatactgtacggaatggattcattctcttctctttttatgaaactctgttgtatatctactgataaaactggaagcaaaaaatctgatagaaagaataagaataagatcaaggattatatggaacacgattattataaaataacaatagttcctggttcctcttccacgtctactagctcgtggtattatacacatgcctagtaatagtctctttgcgttgacggaaagcagactagaaataacaggctaaaatgttcagacaccataatagttcccaacccagataataacagagttccatcaacacattcctttaaactcaatcccaaacccaaaaccgttaaaatgtatccggccaattgatagtagataatgaggtgtacagcgcatgataatttacacagtaaccaaaatgaaaacactttagtaattataagaaatatagacggtaatgtcatcatcaacaatccgataatatgcctgagagtaaacattgatggataaaacaaaaatgctccgcataactctatcatggcaataacacaaccaaacacttgtaaaattcctaaattagtagaaaatacaacggatatcgatgtataagtgatctcgagaaataataagaataaagtaatgcccgtaaagataaacatcaacattgtttggtaatcattaaaccaattagtatgaagttgaactaatttcacagtagattttattccagtgttatcctcgcatgtataagtacctggtaagatatctttatattccataatcaatgagacatcactatccgataacgaatgaagtctagcactagtatgccatttacttaatattgtcgtcttggaagttttattataagttaaaatatcatggttatccaatttccatctaatatactttgtcggattatctatagtacacggaataatgatggtatcattacatgctgtatactctatagtctttgtagttgttataacaaccaacgtatagaggtatatcaacgatattctaactcttgacattttttatttatttaaaatgatacctttgttatttattttattctattttgctaacggtattgaatggcataagtttgaaacgagtgaagaaataatttctacttacttattagacgacgtattatacacgggtgttaatggggcggtatacacattttcaaataataaactaaacaaaactggtttaactaataataattatataacaacatctataaaagtagaggatgcggataaggatacattagtatgcggaaccaataacggaaatcccaaatgttggaaaatagacggttcagacgacccaaaacatagaggtagaggatacgctccttatcaaaatagcaaagtaacgataatcagtcacaacggatgtgtactatctgacataaacatatcaaaagaaggaattaaacgatggagaagatttgacggaccatgtggttatgatttatacacggcggataacgtaattccaaaagatggtttacgaggagcattcgtcgataaagatggtacttatgacaaagtttacattcttttcactgatactatcggctcaaagagaattgtcaaaattccgtatatagcacaaatgtgcctaaacgacgaaggtggtccatcatcattgtctagtcatagatggtcgacgtttctcaaagtcgaattagaatgtgatatcgacggaagaagttatagacaaattattcattctagaactataaaaacagataatgatacgatactatatgtattcttcgatagtccttattccaagtccgcattatgtacctattctatgaataccattaaacaatctttttctacgtcaaaattggaaggatatacaaagcaattgccgtctccagctcctggtatatgtctaccagctggaaaagttgttccacataccacgtttgaagtcatagaaaaatataatgtactagatgatattataaagcctttatctaaccaacctatcttcgaaggaccgtctggtgttaaatggttcgatataaaggagaaggaaaatgaacatcgggaatatagaatatacttcataaaagaaaattctatatattcgttcgatacaaaatctaaacaaactcgtagctcgcaagtcgatgcgcgactattttcagtaatggtaactgcgaaaccgttatttatagcagatatagggataggagtaggaatgccacaaatgaaaaaaatacttaaaatgtaatcttaatcgagtacaccacacgacaatgaacaaacataagacagattatgctggttatgcttgctgcgtaatatgcggtctaattgttggaattatttttacagcgacactattaaaagttgtagaacgtaaattagttcatacaccatcaatagataaaacgataaaagatgcatatattagagaagattgtcctactgactggataagctataataataaatgtatccatttatctactgatcgaaaaacctgggaggaaggacgtaatgcatgcaaagctctaaattcaaattcggatctaattaagatagagactccaaacgagttaagttttttaagaagccttagacgaggctattgggtaggagaatccgaaatattaaaccagacaaccccatataattttatagctaagaatgccacgaagaatggaactaaaaaacggaaatatatttgtagcacaacgaatactcccaaactgcattcgtgttacactatataacaattacactacatttttatcataccactacttcggttagatgttttagaaaaaaataaatatcgccgtaccgttcttgtttttataaaaataacaattaacaattatcaaattttttctttaatattttacgtggttgaccattcttggtggtaaaataatctcttagtgttggaatggaatgctgtttaatgtttccacactcatcgtatattttgacgtatgtagtcacatcgtttacgcaatagtcagactgtagttctatcatgcttcctacatcagaaggaggaacagttttaaagtctcttggttttaatctattaccgttagttttcatgaaatcctttgttttatccacttcacattttaaataaatgtccactatacattcttttgttaattttactagatcgtcatgggtcatagaatttataggttccgtagtccatggatccaaactagcaaacttcgcgtatacggtatcgcgattagtgtatacaccaactgtatgaaaattaagaaaacagtttaatagatcaacagaaatatttaatcctccgtttgatacagatgcgccatatttatggatttcggattcacacgttgtttgtctgaggtgttcgtctagcgttgcttctacgtaaacttcgattcccatatattctttattgtcagaatcgcataccgatttatcatcatacactgtttgaaaactaaatggtatacacatcaaaataataaatactaacgagtacattctgcaatattgttatcgtaattggaaaattagtgttcgagtgagtcggattatgtgagtactggattttatattttgtaataagaataaaatgctaatgtcaagtcttattaaaaacatatataataaataacaatggctgaatggcataaaattatcgaggatatctcaaaaaataataagttcgaggatgccgccatcgttgattacaagactacaaagaatgttctagctgctattcctaacagaacatttgccaagattaatccgggtgaaattattcctctcatcactaatcgtaatattctaaaacctcttattggtcagaaatattgtattgtatatactaactctctaatggatgagaacacgtatgctatggagttgcttactgggtacgcccctgtatctccgatcgttatagcgagaactcataccgcacttatatttttgatgggtaagccaacaacatccagacgtgacgtgtatagaacgtgtagagatcacgctacccgtgtacgtgcaactggtaattaaaataaaaagtaatattcatatgtagtgtcaattttaaatgatgatgatgaaatggataatatccatattgacgatgtcaataatgccggtattggcatacagttcatcgatttttagatttcattcagaggatgtggaattatgttatgggcatttgtattttgataggatctataatgtagtaaatataaaatataatccgcatattccatatagatataattttattaatcgcacgttaaccgtagatgaactagacgataatgtcttttttacacatggttattttttaaaacacaaatatggttcacttaatcctagtttgattgtctcattatcaggaaacttaaaatataatgatatacaatgctcagtaaatgtatcgtgtctcattaaaaatttggcaacgagtacatctactatattaacatctaaacataagacttattctctacatcggtccacgtgtattactataataggatacgattctattatatggtataaagatataaatgacaagtataatgacatctatgattttactgcaatatgtatgctaatagcgtctacattgatagtgaccatatacgtgtttaaaaaaataaaaatgaactcttaattatgctatgctattagaaatggataaaatcaaaattacggttgattcaaaaattggtaatgttgttaccatatcgtataacttggaaaagataactattgatgtcacacctaaaaagaaaaaagaaaaggatgtattattagcgcaatcagttgctgtcgaagaggcaaaagatgtcaaggtagaagaaaaaaatattatcgatattgaagatgacgatgatatggatgtagaaagcgcgtaatacgatctataaaaataagtatataaatactttttatttactgtactcttactgtgtagtggtgataccctactcgattatttttttaaaaaaaaaatacttattctgattcttctagccatttccgtgttcgtttgaatgccacatcgacgtcaaagataggggagtagttgaaatctagttctgcattgttggtacgcacctcaaatgtagtgttggatatcttcaacgtatagttgttgagtagtgatggttttctaaatagaattctcttcatatcattcttgcacgcgtacatttttagcatccatcttggaatcctagatccttgttctattcccaatggtttcatcaatagaagattaaacatatcgtacgaacacgatggagagtaatcgtagcaaaagtaagcatttcctttaatcttagatcccggatactggatatattttgcagccaacacgtgcatccatgcagcatttcctacatatacccggctatgcaccgcgtcatcatcgactgtacgatacataatgttaccgtgttgcttacattgctcgtaaaagactttcatcaatttgtctccttctccgtaaattccagtgggtcttaggcaacaagtatacaattttgctccattcatgattacggaattattggctttcataaccagttgctcggccatacgtttactttttgcgtatacatgtcctggtgatatatcataaagggtatgctcatggccgatgaatggatcaccgtgtttattgggtcctattgcttccatgctactagtatagatcaaatacttgattcctaggtccacacaagctgccaaaatagtctgtgttccataatagtttactttcatgatttcattatcggtgtattttccaaatacatccactagagcagccgtatgaataatcagatttaccccatctagcgcttctctcaccttatcaaagtcgtttatatcacattgtatatagtttataaccttaactttcgaggttattggttgtggatcttctacaatatctatgactctgatttcttgaacatcatctgcactaattaacagttttactatatacctgcctagaaatccggcaccaccagtaaccgcgtacacggccattgctgccactcataatatcagactacttattctattttactaaataatggctgtttgtataatagaccacgataatatcagaggagttatttactttgaaccagtccatggaaaagataaagttttaggatcagttattggattaaaatccggaacgtatagtttgataattcatcgttacggagatattagtcaaggatgtgattccataggcagtccagaaatatttatcggtaacatctttgtaaacagatatggtgtagcatatgtttatttagatacagatgtaaatatatttacaattattggaaaggcgttatctatttcaaaaaatgatcagagattagcgtgtggagttattggtatttcttacataaatgaaaagataatacattttcttacaattaacgagaatggcgtttgatatatcagttaatgcgtctaaaacaataaatgcattagtttacttttctactcagcaaaataaattagtcatacgtaatgaagttaatgatacacactacactgtcgaatttgatagggacaaagtagttgacacgtttatttcatataatagacataatgacaccatagagataagaggggtgcttccagaggaaactaatattggttgcgcggttagtatgacttacttgtataataagtatagttttaaactgattttagcagaatatataagacacagaaatactatatccggcaatatttattcggcattgatgacactagatgatttggctattaaacagtatggagacattgatctattatttaatgagaaacttaaagtagactccgattcgggactatttgactttgtcaactttgtaaaggatatgatatgttgtgattctagaatagtagtagctctatctagtctagtatctaaacattgggaattgacaaataaaaaatataggtgtatggcattagccgaacatatatctgatagtattccaatatctgagctatctagactacgatacaatctatgtaagtatctacgcggacacactgagagcatagaggataaatttgattattttgaagacgatgattcgtctacatgttctgccgtaaccgacagggaaacggatgtataattttttttatagcgtgaaggatatgataaaaaatataattgttgtatttatcccattccaatcaccttatatgattctgtaacacaataaaggagtcttatagatgtatagaggtcagatactggtttgataaactgtttattccacataagtatgtttgactttatggttagacccgcatactttaacaaatcactgaaaattggagttaggtattgacctctcagaatcagttgccgttctggaacattaaatgtattttttatgatatactccaacgcatttatgtgggcatacaacaagtcattactaatggagtattccaagagttttagttgtctagtatttaacaagagaagagatttcaacagactgtttatgaactcgaatgccgcctcattgtcgcttatattgatgatgtcgaattctcccaatatcatcaccgatgagtagctcatcttgttatcgggatccaagttttctaaagatgtcattaaaccctcgatcatgaatggatttatcatcatcgtttttatgttggacatgagcttagtccgtttgtccacatctatagacgacgatttctgaattatttcatatatctctctctttaactccaggaacttgtcaggatggtctactttaatatgttctcgtctaagagatgaaaatctttggatggttgcacgcgacttttctctaaaggatgacgttgcccaagatcctctcttaaatgaatccatcttatccttggacaagatggacagtctattttccttagatggtttaatatttttgttacccatgatctataaaggtagacctaatcgtctcggatgaccatatatttattttcagttttattatacgcataaattgtaaaaaatatgttaggtttacaaaaatgtctcgtggggcattaatcgtttttgaaggattggacaaatctggaaaaacaacacaatgtatgaacatcatggaatctataccggcaaacacgataaaatatcttaactttcctcagagatccactgtcactggaaaaatgatagatgactatctaactcgtaaaaaaacctataatgatcatatagttaatctattattttgtgcaaatagatgggagtttgcatcttttatacaagaacaactagaacagggaattactttaatagttgatagatacgcattttctggagtagcgtatgccgccgctaaaggcgcgtcaatgactctcagtaagagttatgaatctggattgcctaaacccgacttagttatattcttggaatctggtagcaaagaaattaatagaaacgtcggtgaggaaatttatgaagatgttacattccaacaaaaggtattacaagaatataaaaaaatgattgaagaaggagatattcattggcaaattatttcttctgaattcgaggaagatgtaaagaaggagttgattaagaatatagttatagaggctatacacacggttactggaccagtggggcaactgtggatgtaatagtgaaattacattttttataaatagatgttagtacagtgttataaatggatgaagcatattactctggcaacttggaatcagtactcggatacgtgtccgatatgcataccgaactcgtatcaatatctcaattagttattgccaagatagaaactatagataatgatatattaaacaaggacattgtaaattttatcatgtgtagatcaaacttggataatccatttatctctttcctagatactgtatatactattatagatcaagagaactatcagactgagttgattaattcattagacgacaatgaaattatcgattgtatagttaataagtttatgagcttttataaggataacctagaaaatatagtagatgctatcatcactctaaaatatataatgaataatccagattttaaaactacgtatgcagaagtactcggttccagaatagcggatatagatattaaacaagtgatacgtgagaatatactacaattgtctaataatatccgcgaacgatatttgtgaaaaatattaaaaaaaaatactttttttattaaatgacgtcgcttcgcgaatttagaaaattatgctgtgatatatatcacgcatcaggatataaagaaaaatctaaattaattagagactttataacagatagggatgataaatatttgatcattaagctattgcttcccggattagacgatagaatttataacatgaacgataaacaaattataaaattatatagtataatatttaaacaatctcaggaagatatgctacaagatttaggatacggatatataggagacactattaggactttcttcaaagagaacacagaaatccgtccacgagataaaagcattttaactttagaagaagtggatagtttcttaactacgttatcatccgtaactaaagaatcgcatcaaataaaattattgactgatatcgcatccgtttgtacatgtaatgatttaaaatgtgtagtcatgcttattgataaagatctaaaaattaaagcgggtcctcggtacgtacttaacgctattagtcctcatgcctatgatgtgtttagaaaatctaataacttgaaagagataatagaaaattcatctaaacaaaatctagactctatatctatttctgttatgactccaattaatcccatgttagcggaatcgtgtgattctgtcaataaggcgtttaaaaaatttccatcaggaatgtttgcggaagtcaaatacgatggtgaaagagtacaagttcataaaaataataacgagtttgccttctttagtagaaacatgaaaccagtactctctcataaagtggattatctcaaagaatacataccgaaagcatttaaaaaagctacgtctatcgtattggattctgaaattgttcttgtagacgaacataatgtaccgctcccgtttggaagtttaggaatacacaaaaagaaagaatataaaaactctaacatgtgtttgttcgtgtttgactgtttgtactttgatggattcgatatgacggacattccattgtacgaacgaagatcttttctcaaagatgttatggttgaaatacccaatagaatagtattctcagagttgacgaatattagtaacgagtctcagttaactgacgtattggatgatgcactaacgagaaaattagaaggattggtcttaaaagatattaatggagtatacgaaccgggaaagagaagatggttaaaaataaagcgagactatttgaacgagggttccatggcagattctgccgatttagtagtactaggtgcctactatggtaaaggagcaaagggtggtatcatggcagtctttctaatgggttgttacgacgatgaatccggtaaatggaagacggttaccaagtgttcaggacacgatgataatacgttaagggagttgcaagaccaattaaagatgattaaaattaacaaggatcccaaaaaaattccagagtggttagtagttaataaaatctatattcccgattttgtagtagaggatccgaaacaatctcagatatgggaaatttcaggagcagagtttacatcttccaagtcccataccgcaaatggaatatccattagatttcctagatttactaggataagagaggataaaacgtggaaagaatctactcatctaaacgatttagtaaacttgactaaatcttaatagttacatacaaactgaaaattaaaataacactatttagttggtggtcgccatggatggtgttattgtatactgtctaaacgcgctagtaaaacatggcgaggaaataaatcatataaaaaatgatttcatgattaaaccatgttgtgaaagagtttgtgaaaaagtcaagaacgttcacatcggcggacaatctaaaaacaatacagtgattgcagatttgccatatctggataatgctgtatcggatgtatgcaattcactgtataaaaagaatgtatcaagaatatccagatttgctaatttgataaagatagatgacgatgacaagactcctactggtgtatataattattttaaacctaaagatgccattcctgttattatatctataggaaaggatagagatgtctgtgaactattaatctcatcagacatatcgtgtgcatgcgtggagttaaattcatatcacgtagccattcttcccatggatgtttccttttttaccaaaggaaatgcatcattgattattctcctgtttgatttctctatcgatgcggcacctctcttaagaagtgtaaccgataataatgttattatatctagacaccagcgtctacatgacgagcttccgagttccaattggttcaagttttacataagtataaagtccgactattgttctatattatatatggttgttgatggatctgtgatgcatgcgatagctgataatagaactcacgcaattattagcaaaaatatattagacaatactacgattaacgatgagtgtagatgctgttattttgaaccacagattaggattcttgatagagatgagatgctcaatggatcatcgtgtgatatgaacagacattgtattatgatgaatttacctgatgtaggcgaatttggatctagtatgttggggaaatatgaacctgacatgattaagattgctctttcggtggctggtaatttaataagaaatcgagactacattcccgggagacgaggatatagctactacgtttacggtatagcctctagataatttttttaagcacgaaataaaaaacataattttaaaccaatctatttcatactattttgtgtgatcaccatggacataaagatagatattagtatttctggtgataaatttacggtgactactaggagggaaaatgaagaaagaaaaaaatatctacctctccaaaaagaaaaaactactgatgttatcaaacctgattatcttgagtacgatgacttgttagatagagatgagatgtctactattctagaggaatattttatgtacagaggtctattaggcctcagaataaaatatggacgactctttaacgaaattaaaaaattcgacaatgatgcggaagaacaattcggtactatagaagaactcaagcagaaacttagattaaattctgaagagggagcagataactttatagattatataaaggtacaaaaacaggatatcgtcaaacttactgtatacgattgcatatctatgataggattgtgtgcatgcgtggtagatgtttggagaaatgagaaactgttttctagatggaaatattgtttacgagcgattaaactgtttattaatgatcacatgcttgataagataaaatctatactgcagaatagactagtatatgtggaaatgtcatagaaagttaaaagttaatgagagcaaaaatatataaggttgtattccatatttgttattttttctgtaatagttaaaaaatacattcgatggtctatctatcagattattatgtgttataaggtactttttctcataataaactagagtatgagtaagatagtgtttttcaaaacatataaatctaaaattgatggatgagatatacagctattaatttcgaaaatatattttaatctgataactttaaacatggatttttgatggtggtttaacgttttaaaaaaagattttgttattgtagtatatgataatattaaaagatggatataaagaatttgctgactgcatgtactattttttacattactacattggctacggcagatatacctacttcgtcactgccacacgctccggtaaacggggcatgtgacgagggagaatatcttgataagaggcataatcaatgttgtaatcagtgtccacctggagaatttgccaaggtcagatgtaatggtaacgataacacaaaatgtgaacgctgcccacctcatacatataccgcaatccccaattactctaatggatgtcatcaatgtagaaaatgcccaacaggatcatttgataaggtaaagtgtaccggaacacagaacagtaaatgttcgtgtcttcctggttggtattgcgctactgattcttcacagactgaagattgtcgagattgtataccaaaaaggagatgtccatgcggatactttggtggaatagatgaacaaggaaatcctatttgtaaatcgtgttgtgttggtgaatattgcgactacctacgtaattatagacttgatccatttcctccatgcaaactatctaaatgtaattaattatgattttgatgataatgttaccatacattatatcgctacttggttagtgtattattcagtatgaagacctattaataattacttatcttttgacgatcttgttataattataatataaaaacttatggcatagtaacttataattgctgacgcgataaattcgtaataatctgttttgttcaaaggaatctacaggcataaaaataaaaatataatttataatatactcttacagcgcgccatcatgaataacagcagtaaattaattgctgttattaatggatttagaaatagtggacgattttgtgatattaatatagttattaatgatgaaaggataaacgctcacagactcatcctatctggagcctccgaatatttttccattctgttttccaataattttatcgattctaatgaatacgaagttaatctaagtcatttagattatcaaagcgtaaacgatttgatcgattacatttatgggatacctttgagcctaactaacgataacgtgaaatatattctttcaaccgctgattttttacaaattggatctgctattacggagtgtgaaaattacatacttaaaaatctttgttctagaaactgtatcgatttctacatatacgctgataaatataataacaagaaaatagaatcagcgtcgtttaacacaatattacaaaatattttgagactcatcaacgatgaaaactttaaatacttaacagaggaatcaatgataaaaattttaagcgatgatatgttaaatataaaaaatgaggatttcgccccactaattctcattaaatggttagagagtactcaacaaccatgcaccgtcgagttacttaaatgcctcagaatatcattgctttccccacaagttataaaatcactttatagtcatcgactggttagttcaatctacgaatgtataacattcttaaacaatatagcattcttggatgaatcatttcctagataccatagcatcgagttgatatctatcggtataagtaattcgcatgataagatttccataaactgctacaatcataaaaaaaatacatgggaaatgatatcttcacgtagatataggtgtagtttcgcagtggccgtcctggataatattatttatatgatgggtggatatgatcagtccccgtatagaagttcaaaggttatagcgtacaatacatgtacaaattcttggatatatgatataccagagctaaaatatcctcgttctaattgtgggggactggctgatgacgaatacatttattgtataggcggcatacgcgatcaggattcatcgttgacatctagtattgatagatggaagccatcaaaaccatattggcagaagtatgctaaaatgcgcgaaccaaaatgtgatatgggggttgcgatgttaaacggattaatatatgttataggtggaatcgttaaaggtgacacgtgtaccgacgcactagagagtttatcagaagatggatggatgaagcatcaacgtcttccaataaaaatgtccaatatgtcgacgattgttcatgatggcaagatttatatatctggaggttacaacaatagtagtgtagttaatgtaatatcgaatttagtccttagctataattcgatatatgatgaatggaccaaattatcatcattaaacattcctagaattaatcccgctctatggtcagcgcataataaattatatgtaggaggaggaatatctgatgatgttcgaactaatacatctgaaacatacgacaaagaaaaagattgttggacattggataatggtcacgtgttaccacgcaattatataatgtataaatgcgaaccgattaaacataaatatccattggaaaaaacacagtacacgaatgattttctaaagtatttggaaagttttataggtagttgatagaacaaaatacataattttgtaaaaataaatcactttttatactaatatgacacgattaccaatacttttgttactaatatcattagtatacgctacaccttttcctcagacatctaaaaaaataggtgatgatgcaactctatcatgtaatcgaaataatacaaatgactacgttgttatgagtgcttggtataaggagcccaattccattattcttttagctgctaaaagcgacgtcttgtattttgataattataccaaggataaaatatcttacgactctccatacgatgatctagttacaactatcacaattaaatcattgactgctagagatgccggtacttatgtatgtgcattctttatgacatcgcctacaaatgacactgataaagtagattatgaagaatactccacagagttgattgtaaatacagatagtgaatcgactatagacataatactatctggatctacacattcaccggaaactagttctgagaaacctgattatatagataattctaattgctcgtcggtattcgaaatcgcgactccggaaccaattactgataatgtagaagatcatacagacaccgtcacatacactagtgatagcattaatacagtaagtgcatcatctggagaatccacaacagacgagactccggaaccaattactgataaagaagatcatacagtcacagacactgtctcatacactacagtaagtacatcatctggaattgtcactactaaatcaaccaccgatgatacgtacaatgataatgatacagtaccaccaactactgtaggcggtagtacaacctctattagcaattataaaaccaaggactttgtagaaatatttggtattaccgcattaattatattgtcggccgtggcaatattctgtattacgtattatatatgtaataaacgttcacgtaaatacaaaacagagaacaaagtctagatttttgacttacataaatgtctgggatagtaaaatctatcatattgagcgggccatctggtttaggaaagacagccatagccaaaagactatgggaatatatttggatttgtggtgtcccataccactagatttcctcgtcctatggaacgagaaggtgtcgattaccattacgttaacagagaggccatctggaagggaatagccgccggaaactttctagaacatactgagtttttaggaaatatttacggaacttctaaaactgctgtgaatacagcggctattaataatcgtatttgtgtgatggatctaaacatcgatggcgttagaagtcttaaaaatacgtacctaatgccttactcggtgtatataagacctacctctcttaaaatggttgagaccaagcttcgttgtagaaacactgaagcggatgatgagattcatcgtcgtgtgatgttggcaaaaactgacatggatgaggcaggtgaagccggtctattcgacactattatcattgaagatgatgtgaatttagcatatagtaagttaattcagatactacaggaccgtattagaatgtattttaacactaattagagacttaagacttaaaacttgataattaataatataactcgtttttatatgtggctatttcaacgtctaatgtattagttaaatattaaaacttaccacgtaaaacttaaaatttaaaatgatatttcattgacagatagatcacacattatgaactttcaaggacttgtgttaactgacaattgcaaaaatcaatgggtcgttggaccattaataggaaaaggtggattcggtagtatttatactactaatgacaataattatgtagtaaaaatagagcccaaagctaacggatcattatttaccgaacaggcattttatactagagtacttaaaccatccgttatcgaagaatggaaaaaatctcacaatataaagcacgtaggtcttatcacgtgcaaggcatttggtctatacaaatccattaatgtggaatatcgattcttggtaattaatagattaggtgcagatctagatgcggtgatcagagccaataataatagattaccaaaaaggtcggtgatgttgatcggaatcgaaatcttaaataccatacaatttatgcacgagcaaggatattctcacggagatattaaagcgagtaatatagtcttggatcaaatagataagaataaattatatctagtggattacggattggtttctaaattcatgtctaatggcgaacatgttccatttataagaaatccaaataaaatggataacggtactctagaatttacacctatagattcgcataaaggatacgttgtatctagacgtggagatctagaaacacttggatattgtatgattagatggttgggaggtatcttgccatggactaagatatctgaaacaaagaattgtgcattagtaagtgccacaaaacagaaatatgttaacaatactgcgactttgttaatgaccagtttgcaatatgcacctagagaattgctgcaatatattaccatggtaaactctttgacatattttgaggaacccaattacgacaagtttcggcacatattaatgcagggtgtatattattaagtgtggtgtttggtcgataaaaattaaaaaataacttaatttattattgatctcgtgtgtacaaccgaaatcatggcgatgttttacgcacacgctctcggtgggtacgacgagaatcttcatgcctttcctggaatatcatcgactgttgccaatgatgtcaggaaatattctgttgtgtcagtttataataacaagtatgacattgtaaaagacaaatatatgtggtgttacagtcaggtgaacaagagatatattggagcactgctgcctatgtttgagtgcaatgaatatctacaaattggaaatccgatccatgatcaagaaggaaatcaaatctctatcatcacatatcgccacaaaaactactatgctctaagcggaatcgggtacgagagtctagacttgtgtttggaaggagtagggattcatcatcacgtacttgaaacaggaaacgctgtatatggaaaagttcaacatgattattctactatcaaagagaaggccaaagaaatgagtgcacttagtccaggacctatcatcgattaccacgtctggataggagattgtatctgtcaagttactgctgtggacgtacatggaaaggaaattatgaaaatgagattcaaaaagggtgcggtgcttccgatcccaaatctggtaaaagttaaacttggggagaatgatacagaaaatctttcttctactatatcggcgacaccatcgaggtaaccacctctctggaagacagcgtgaataatgtactcatgaaacgtttggaaactatacgccatatgtggtctgttgtatatgatcattttgatattgtgaatggtaaagaatgctgttatgtgcatacgcatttgtctaatcaaaatcttataccgagtactgtaaaaacaaatttgtacatgaagactatgggatcatgcattcaaatggattccatggaagctctagagtatcttagcgaactgaaggaatcaggtggatggagtcccagaccagaaatgcaggaatttgaatatccagatggagtggaagacactgaatcaattgagagattggtagaggagttcttcaatagatcagaacttcaggctggtgaatcagtcaaatttggtaattctattaatgttaaacatacatctgtttcagctaagcaactaagaacacgtatacggcagcagcttccttctatactctcatcttttaccaacacaaagggtggatatttgttcattggagttgataataatacacacaaagtatttggattcacggtgggttacgactacctcagactgatagagaatgatatagaaaagcatatcaaaagactttgtgttgtgtatttctgtgagaagaaagaggacatcaagtacgcgtgtcgattcatcaaggtatataaacctggggatgaggctacctcgacatacgtgtgcgctatcaaagtggaaagatgctgttgtgctgtgtttgcagattggccagaatcatggtatatggatactaatggtatcaagaagtattctccagatgaatgggtgtcacatataaaattttaattaatgtaactatagagaacaaataataaggttgtaatatcatatagacaataactaacaattaattagtaactgttatctcttttttaattaaccaactaactatatacctattaatacatcgtaattatagttcttaacatctattaatcattaattcgcttctttaattttttataaactaacattgttaattgaaaagggataacatgttacagaatataaattatatatggatttttttaaaaaggaaatacttgactggagtatatatttatctcttcattatatagcacgcgtgttttccaatttttccacatcccatataatacaggattataatctcgttcgaacatacgagaaagtggataaaacaatagttgattttttatctaggttgccaaatttattccatattttagaatatggggaaaatattctacatatttattctatggatgatgctaatacgaatattataattttttttctagatagagtattaaatattaataagaacgggtcatttatacacaatctcgggttatcatcatccattaatataaaagaatatgtatatcaattagttaataatgatcatccagataataggataagactaatgcttgaaaatggacgtagaacaagacattttttgtcctatatatcagatacagttaatatctatatatgtattttaataaatcatggattttatatagatgccgaagacagttacggttgtacattattacatagatgtatatatcactataagaaatcagaatcagaatcatacaatgaattaattaagatattgttaaataatggatcagatgtagataaaaaagatacgtacggaaacacaccttttatcctattatgtaaacacgatatcaacaacgtggaattgtttgagatatgtttagagaatgctaatatagactctgtagactttaatagatatacacctcttcattatgtctcatgtcgtaataaatatgattttgtaaagttattaatttctaaaggagcaaatgttaatgcgcgtaataaattcggaactactccattttattgtggaattatacacggtatctcgcttataaaactatatttggaatcagacacagagttagaaatagataatgaacatatagttcgtcatttaataatttttgatgctgttgaatctttagattatctattatccagaggagttattgatattaactatcgtactatatacaacgaaacatctatttacgacgctgtcagttataatgcgtataatacgttggtctatctattaaacaaaaatggtgattttgagacgattactactagtggatgtacatgtatttcggaagcagtcgcaaacaacaacaaaataataatggaagtactattgtctaaacgaccatctttgaaaattatgatacagtctatgatagcaattactaaacataaacagcataatgcagatttattgaaaatgtgtataaaatatactgcgtgtatgaccgattatgatactcttatagatgtacagtcgctacagcaatataaatggtatattttaagatgtttcgatgaaatagatatcatgaagagatgttatataaaaaataaaactgtattccaattagttttttgtatcaaagacattaatactttaatgagatacggtaaacatccttctttcgtgaaatgcactagtctcgacgtatacggaagtcgtgtacgtaatatcatagcatctattagatatcgtcagagattaattagtctattatccaagaagctggatcctggagataaatggtcgtgttttcctaacgaaataaaatataaaatattggaaaactttaacgataacgaactatccacatatctaaaaatcttataaacattattaaaatataaaatctaagtaggataaaatcacactacatcattgtttccttttagtgctcgacagtgtatactatttttaacgctcataaataaaaatgaaaacgatttccgttgttacgttgttatgcgtactacctgctgttgtttattcaacatgtactgtacccactatgaataacgctaaattaacgtctaccgaaacatcgtttaatgataaccagaaagttacgtttacatgtgatcagggatatcattctttggatccaaatgctgtctgtgaaacagataaatggaaatacgaaaatccatgcaaaaaaatgtgcacagtttctgattatgtctctgaactatataataaaccgctatacgaagtgaattccaccatgacactaagttgcaacggcgaaacaaaatattttcgttgcgaagaaaaaaatggaaatacttcttggaatgatactgttacgtgtcctaatgcggaatgtcaacctcttcaattagaacacggatcgtgtcaaccagttaaagaaaaatactcatttggggaatatataactatcaactgtgatgttggatatgaggttattggtgcttcgtacataagttgtacagctaattcttggaatgttattccatcatgtcaacaaaaatgtgatatgccgtctctatctaatggattaatttccggatctacattttctatcggtggcgttatacatcttagttgtaaaagtggttttacactaacggggtctccatcatccacatgtatcgacggtaaatggaatcccgtactcccaacatgtgtacgatctaacgaaaaatttgatccagtggatgatggtcccgacgatgagacagatttgagcaaactctcgaaagacgttgtacaatatgaacaagaaatagaatcgttagaagcaacttatcatataatcatagtggcgttaacaattatgggcgtcatatttttgatctccgttatagtattagtttgttcctgtgacaaaaataatgaccaatataagttccataaattgctaccgtaaatataaatccgttaaaataattaataacgaacaagtatcaaaagattaaagacttatagctagaatcaattgagatgtcttcttcagtggatgttgatatctacgatgccgttagagcatttttactcaggcactattatgacaagagatttattgtgtatggaagaagtaacgccatattacataatatatacaggctatttacaagatgcgccgttataccgttcgatgatatagtacgtactatgccaaatgaatcacgtgttaaacaatgggtgatggatacacttaatggtataatgatgaatgaacgcgatattactgtatgtgtgggcaccggactacgattcatggaaatgtttttcgattacaataaaaatagtatcaacaatcaactaatgtatgatataattctagctaatgagagatatagaagcgcttttaacgacgatggtatatacatccgtagaaatatgattaacaagttgtacggatacgcatctctaactactattggcacgatcgctggaggtgtttgttattatctgttgatgcatctagttagtttgtataaataattatttcaatatactagttaaaattttaagattttaaatgtataaaaaactaataacgtttttatttgtaataggtgcattagcatcctattcgaataatgagtacactccgtttaataaactgagtgtaaaactctatatagatggagtagataatatagaaaattcatatactgatgataataatgaattggtgttaaattttaaagagtacacaatttctattattacagagtcatgcgacgtcggatttgattccatagatataaatgttataaacgactataaaattattgatatgtataccattgactcgtctactattcaacgcagaggtcacacgtgtagaatatctaccaaattatcatgccattatgataagtacccttatattcacaaatatgatggtgatgagcgacaatattctattactgcagagggaaaatgctataaaggaataaaatatgaaataagtatgatcaacgatgatactctattgagaaaacatactcttaaaattggatctacttatatatttgatcgtcatggacatagtaatacatattattcaaaatatgatttttaaaaatttaaaatatattatcacttcagtgacagtagtcaaataacaaacaacaccatgagatatattataattctcgcagttttgttcattaatagtatacatgctaaaataactagttataagtttgaatccgtcaattttgattccaaaattgaatggactggggatggtctatacaatatatcccttaaaaattatggcatcaagacgtggcaaacaatgtatacaaatgtaccagaaggaacatacgacatatccgcatttccaaagaatgatttcgtatctttctgggttaaatttgaacaaggcgattataaagtggaagagtattgtacgggactatgcgtcgaagtaaaaattggaccaccgactgtaacattgactgaatacgacgaccatatcaatttgtacatcgagcatccgtatgctactagaggtagcaaaaagattcctatttacaaacgcggtgacatgtgtgatatctacttgttgtatacggctaacttcacattcggagattctaaagaaccagtaccatatgatatcgatgactacgattgcacgtctacaggttgcagcatagactttgtcacaacagaaaaagtgtgcgtgacagcacagggagccacagaaaggtttctcgaaaaaattactccatggagttcgaaagtatgtctgacacctaaaaagagtgtatatacatgcgcaattagatccaaagaagatgttcccaatttcaaggacaaaatggccagagttatcaagagaaaatttaatacacagtctcaatcttatttaactaaatttctcggtagcacatcaaatgatgttaccacttttcttagcatgcttaacttgactaaatattcataactaatttttattaatgatacaaaaacgaaataaaactgcatattatacactggttaacgcccttataggctctaaccattttcaagatgaggtccctgattatagtccttctgttcccctctatcatctactccatgtctattagacaatgtgagaagactgaagaggaaacatggggattgaaaatagggttgtgtataattgccaaagatttctatcccgaaagaactgattgcagtgttcatctcccaactgcaagtgaaggattgataactgaaggcaatggattcagggatatacgaaacaccgataaattataaaaaaagcaatgtgtccgctgtttccgttaataatactattttcgtaactggcggattattcataaataactctaatagcacgatcgtggttaacaatatggaaaaacttgacatttataaagacaaacaatggtcgattatagaaatgcctatggctagggtatatcacggcatcgactcgacatttggaatgttatattttgccggaggtctatccgttaccgaacaatatggtaatttagagaaaaacaacgagatatcttgttacaatcctagaacgaataagtggtttgatatttcatatactatttataagatatccatatcatcattgtgtaaactaaataacgtcttctatgtatttagtaaggacattggatatgtggaaaagtatgatggtgcatggaagttagtacatgatcgtctccccgctataaaggcattatcaacttctccttattgattgaaaatgaaaatataaatagtttttatgtatagcagtattaccctatagttttattgcttactactaacatggatacagatgttacaaatgtagaagatatcataaatgaaatagatagagagaaagaagaaatactaaaaaatgtagaaattgaaaataataaaaacattaacaagaatcatcccaatgaatatattagagaagcactcgttattaataccagtagtaatagtgattccattgataaagaagttatagaatgtatcagtcacgatgtaggaatatagatcatatctactaatttttataatcgatacaaaacataaaaaacaactcgttattacatagcaggcatggaatccttcaagtattgttttgataacgatggcaagaaatggattatcggaaatactttatattctggtaattcaatactctataaggtcagaaaaaatttcactagttcgttctacaattacgtaatgaagatagatcacaaatcacacaagccattgttgtctgaaatacgattctatatatctgtattggatcctttgactatcgacaactggacacgggaacgtggtataaagtatttggctattccagatctgtatggaattggagaaaccgatgattatatgttcttcgttataaagaattcgggaagagtattcgccccaaaggatactgaatcagtcttcgaagcatgcgtcactatgataaacacgttagagtttatacactctcgaggatttacccatggaaaaatagaaccgaggaatatactgattagaaataaacgtctttcactaattgactattctagaactaacaaactatacaagagtggaaactcacatatagattacaacgaggacatgataacttcaggaaatatcaattatatgtgtgtagacaatcatcttggagcaacagtttcaagacgaggagatttagaaatgttgggatattgcatgatagaatggttcggtggcaaacttccatggaaaaacgaaagtagtataaaagtaataaaacaaaaaaaagaatataaaaaatttatagctactttctttgaggactgttttcctgaaggaaatgaacctctggaattagttagatatatagaattagtatacacgttagattattctcaaactcctaattatgacagactacgtagactgtttatacaagattgaaattatattcttttttttatagagtgtggtagtgttacggatatctaatattaatattagactatctctatcgcgctacacgaccaatatcgattactatggatatcttctatgaaaggagagaatgtattcatttctccagcgtcaatctcgtcagtattgacaatactgtattatggagctaatggatccactgctgaacagctatcaaaatatgtagaaacggaggagaacacggataaggttagcgctcagaatatctcattcaaatccatgaataaagtatatgggcgatattctgccgtgtttaaagattcctttttgagaaaaattggcgataagtttcaaactgttgacttcactgattgtcgcactatagatgcaatcaacaagtgtgtagatatctttactgaggggaaaatcaatccactattggatgaaccattgtctcctagcaattagtgccgtatactttaaagcaaaatggttgacgccattcgaaaaggaatttaccagtgattatcccttttacgtatctccgacggaaatggtagacgtaagtatgatgtctatgtacggcgagctatttaatcacgcatctgtaaaagaatcattcggcaacttttcaatcatagaactgccatatgttggagatactagtatgatggtcattcttccagacaagattgatggattagaatccatagaacaaaatctaacagatacaaattttaagaaatggtgtgactttatggatgctatgtttatagatgttcacattcccaagtttaaggtaacaggttcgtataatctggtggatactctagtaaagtcaggactgacagaggtgttcggttcaactggagattatagcaatatgtgtaatttagatgtgagtgtcgacgctatgatccacaaaacgtatatagatgtcaatgaagagtatacagaagcagctgcagcaacttctgtactagtggcagactgtgcatcaacagttacaaatgagttctgtgcagatcatccgttcatctatgtgattaggcatgttgatggcaaaattcttttcgttggtagatattgctctccaacaactaattgttaaccattttttttaaaaaaaatagaaaaaacatgtggtattagtgcaggtcgttgttcttccaattgcaattggtaagatgacggccaactttagtacccacgtcttttcaccacagcactgtggatgtgacagactgaccagtattgatgacgtcaaacaatgtttgactgaatatatttattggtcgtcctatgcataccgcaacaggcaatgcgctggacaattgtattccacactcctctcttttagagatgatgcggaattagtgttcatcgacattcgcgagctggtaaaaaatatgccgtgggatgatgtcaaagattgtgcagaaatcatccgttgttatataccggatgagcaaaaaaccatcagagagatttcggccatcatcggactttgtgcatatgctgctacttactggggaggtgaagaccatcccactagtaacagtctgaacgcattgtttgtgatgcttgagatgctaaattacgtggattataacatcatattccggcgtatgaattgatgagttgtacatcttgacattttctttcttctcttctccctcttctccctttcccagaaacaaactttttttacccactataaaataaaatgagtatactacctattatatttcttcctatatttttttattcttcattcgttcagacttttaacgcgcctgaatgtatcgacaaagggcaatattttgcatcattcatggagttagaaaacgagccagtaatcttaccatgtcctcaaataaatacgctatcatccggatataatatattagatattttatgggaaaaacgaggagcggataatgatagaattataccgatagataatggtagcaatatgctaattctgaacccgacacaatcagactctggtatttatatatgcattaccacgaacgaaacctactgtgacatgatgtcgttaaatttgacaatcgtgtctgtctcagaatcaaatatagatcttatctcgtatccacaaatagtaaatgagagatctactggcgaaatggtatgtcccaatattaatgcatttattgctagtaacgtaaacgcagatattatatggagcggacatcgacgccttagaaataagagacttaaacaacggacacctggaattattaccatagaagatgttagaaaaaatgatgctggttattatacatgtgttttagaatatatatacagaggtaaaacatataacgtaaccagaattgtaaaattagaggtacgggataaaataataccttctactatgcaattaccagatggcattgtaacttcaataggtagtaatttgactattgcatgcagagtatcgttgagacctcccacaacggacaccgacgtcttttggataagtaatggtatgtattacgaagaagatgatggggacggaaacggtagaataagtgtagcaaataaaatctatatgaccgataagagacgtgttattacatcccggttaaacattaatcctgtcaaggaagaagatgctacaacgtttacgtgtatggcgtttactattcctagcatcagcaaaacagttactgttagtataacgtgaatgtatgttgttacatttccatgtcaattgagtttataagaatttttatacattatcttccaacaagcaattgacgaacgtattgctatgattaactcccacgatactatgcatattattaatcattaacttgcagactatacctagagctattttgacatactcgtgttcttgtgtaattgcagtatctatattattaaagtacgtaaatctagctatagttttattatttaattttagataatataccgtctccttatttttaaaaattgttacatcctttattaaatcatgaatgggaatttctatgtcatcgttagtatattgtgaacaacaagagcagatatctataggaaagggtggaatgcgatacattgatctatgtagttttaaaacacacgcaaactttgaagaatttatataaatcattccatcgatacatccttctatgttgagatgtatatatccaggaattcgtttattaatatcgggaaatgtataaactaaaacattgcccgaaagcggtgcctctatctgcgttatatccgttcttaacttacaaaatgtaaccaatacctttgcatgacttgttttgttcggcaacgttagtttaaacttgacgaatggattaattacaatagcatgatccgcgcatctattaagtttttttactttaacgcccttgtatgtttttacagagactttatctaaatttctagtgcttgtatgtgttataaatataacgggatatagaaccgaatcacctaccttagatacccaattacattttatcagatccagataataaacaaattttgtcgccctaactaattctatattgttatatattttacaattggttatgatatcatgtaataacttggagtctaacgcgcatcgtcgtacgtttatacaattgtgatttagtgtagtatatctacacatgtatttttccgcactatagtattctggactagtgataaaactatcgttatatctgtcttcaatgaactcatcgagatattgctctctgtcatattcatacacctgcataaactttctagacatcttacaatccgtgttattttaggatcatatttacatatttacgggtatatcaaagatgttagattagttaatgggaatcgtctataataatgaatattaaacaattatatgaggacttttaccacaaagcatcataaaaatgagtcgtcgtctgatttatgttttaaatatcaaccgcgaatcaactcataaaatacaagagaatgaaatatatacatattttagtcattgcaatatagaccatacttctacagaacttgattttgtagttaaaaactatgatctaaacagacgacaacctgtaactgggtatactgcactacactgctatttgtataataattactttacaaacgatgtactgaagatattattaaatcatggagtggatgtaacgatgaaaaccagtagcggacgtatgcctgtttatatattgcttactagatgttgcaatatttcacatgatgtagtgatagatatgatagacaaagataaaaaccacttatcgcatagagactattccaacctactactagagtatataaaatctcgttacatgttattgaaggaagaggatatcgatgagaacatagtatccactttattagataagggaatcgatcctaactttaaacaagacggatatacagcgttacattattattatttgtgtctcgcacacgtttataaaccaggtgagtgtagaaaaccgataacgataaaaaaggccaagcgaattatttctttgtttatacaacatggagctaatctaaacgcgttagataattgtggtaatacaccattccatttgtatcttagtattgaaatgtgtaataatattcatatgactaaaatgctgttgacttttaatccgaatttcgaaatatgtaataatcatggattaacgcctatactatgttatataacttccgactacatacaacacgatattcttgttatgttaatacatcactatgaaacaaatgttggagaaatgccgatagatgagcgtcgtatgatcgtattcgagtttatcaaaacatattctacacgtccggcagattcgataacttatttgatgaataggtttaaaaatataaatatttatacccgctatgaaggaaagacattattacacgtagcatgtgaatataataatacacaagtaatagattatcttatacgtatcaacggagatataaatgcgttaaccgacaataacaaacacgctacacaactcattatagataacaaagaaaattccccatataccattaattgtttactgtatatacttagatatattgtagataagaatgtgataagatcgttggtggatcaacttccatctctacctatctttcgtcgcttatcatactagtcatatcctaaatgttgatcatattccaccaaatgattgtgaaagagattgagattaaatcgtctaacaaacaattagtttttatgacattaacatataataaataaattaatcattattgacttaacgatgacgaaagttatcatcatcttaggattcttgattattaatacaaattcattgtctatgaaatgtgaacaaggtgtctcatattataattcacaagaattaaagtgttgtaaactatgtaagccaggaacatattcagatcatcgatgtgataaatacagcgataccatttgtggacattgtccgagtgacacattcacgtcaatatataatcgttctccttggtgtcatagttgtagaggtccatgtggtactaatcgagtagaggtcacaccttgtacacctaccacaaatagaatctgtcattgtgactcgaatagttattgtctccttaaagcttctgatggtaactgtgttacatgtgctcctaaaacaaaatgtggtcgtgggtatggaaagaaaggagaagatgaaatgggtaataccatttgtaagaaatgtcggaagggtacttattcagatattgtatctgactctgatcaatgtaaaccaatgacaagataagacttactcgcatctactggatagacataaaatatcctcctcgtaataatgaaatataaatatacactaattattaatatcaataacaatcgagtattaatatataggtcatttttaaatcccttttgggttccgtcccaaacggcgtttcggtctgcgtcgccgccatggccatgccgagcctctccgcgtgctcctccatcgaggacgacttcaactatggcagctcggtggcgtctgccagcgtgcacatacgaatggcatttctaagaaaagtctacggtatcctttgtctacaatttcttttaacaacggcaacaactgcagtatttttatactttgactgcatgcggacatttatacaagggagtcctgttctaatattggcatcaatgttcggatctataggcttgattttcgcattgactttacacagacataaacatcccctgaatctgtacctgctttgtggatttacactgtcggaatctctaacgctggcctctgttgttactttctatgatgtgcatgtcgttatgcaagctttcatgctgactactgcagcgtttcttgctctgactacatatactctacaatcaaagagagatttcagtaaacttggagcaggattgtttgctgctttgtggattttaattttgtcaggactcttggggatatttgtgcaaaatgagacagtgaagctggtcctgtctgcttttggggcccttgtattctgtggattcattatctatgacacgcactcactaatacataagctctcgcctgaagagtatgtgttagcctctatcaatctctacttggatatcatcaatctgttcttgcatctgttgcagcttttggaagtatctaataagaaataaagtttaaaatagaattaataaaaacatataggtcattttttaaacatggattggaaaccaaggtagttagttaatacacacaagatatatttttttcacatcatccacccatgggtaacaccaaggttgttagttaataatatacaagatattttttctcactctgatccatgtaaaccaaggacgagataagacactctcattcctcatccacaaccccattaaaaaaatggaaattaaagccctctattagcataaacggctacaggtctaccatcaggttaaccttcgtctaccttcacaatggcctctccttgtgcccagttcagaccctgtcattgccactccctgaataccgtggccgacgtcagacattgtctgactgaatacatcctgtgggtttctcatagatggacccatagagaaactgcagggcctctctacaggcttctcatctctttcagaactgatgcaacggagctctttggtggtgagttgaaggagttctcggattcacttccgtgggacaatatcgacaattgcgtggagatcattaaatgtttcatcagaaatgactccatgaaaaccgccgaagaacttcgtgcaatcattggactttgtactcaatcagctatcgtctctggaagagtcttcaacgataagtatatcgacatactacttatgctgcgaaagattctgaacgagaacgactatctcaccctcttggatcatatccgcactgctaaatactaaatctccttcatgctctctcactacactttttatcatcttatgaggaatgattgccttcgtgaaataggaataattagcaccagaatagctatggattgcacatgtattctatgtcgtctactggatgaagatgtgacgtacaaaaaaataaaactagaaattgaaacgtgtcacaacttatcaaaacatatagatagacgaggaaacaatgcgctacattgttacgtctccaataaatgcgatacagacattaagattgttctctcgcggagtcgagagactttgtagaaacaacgaaggattaactccgctaggagcatacagtaagcatagatacgtaaaatctcagattgtgcatctactgatatccagctattcaaattcctctaacgaactcaagtcgaatataaatgatttcgatctgtattcgtataatatcgacttacgtctgctaaaatacctaattgtggataaacggatacgtccgtccaagaatacgaattatgcaatcaatggtctcggattggtggatatatacgtaacgacgcctaatccgagaccagaagtattgctatggcttcttaaatcagaatgttacagcaccggttacgtatttcgtacctgtatgtacgacagtgatatgtgtaagaactctcttcattactatatatcgtctcatagagaatctcaatctctatccaaggatgtaattaaatgtttgatcaataacaatgtttccatccatggcagagacgaaggaggatctttacccatccaatactactggtctttctcaaccatagatatagagattgttaaattattattaataaaggatgtggacacgtgtagagtatacgacgtcagccctatattagaggcgtattatctaaacaagcgatttagagtaaccccatataatgtagacatggaaatcgttaatcttcttattgagagacgtcatactcttgtcgacgtaatgcgtagtattacttcgtacgattccagagaatataaccactacatcatcgataacattctaaagagatttagacaacaggatgtacaagccatgttgataaactacttacattacggcgatatggtaagtatacctatcattcaatgcatgttagataacggagcaaccatggataagacgacggacaacaactatcctctacacgactactttgttaataataatctcgtcgatgtaaacgtcgtaaggtttatcgtggaaaatatggacacgcggctgtaaatcacatatcgaacaatggccgtctatgtatgtacggtctgatattatcgagatttaataattgcgggtatcactgttatgaaaccatactgatagatgtatttgatatactaagcaagtacatggatgatatagatatgatcgataactctactatattacgcggtcgatgtcaataatatacaatttgcaaagcggttattggaatatggagcgagtgtcacaacatcacgctcgataatcaatacggccatccagaaaagcagttaccaaagagaaaacaaaacgaggatagttgatttattactgagttaccatcccactctagagactatgattgacgcatttaatagagatatacgctatctatatcctgaaccattatcggcatgtatcagatacgccttaatcctagatgatgattttccttctaaagtaaagtatgatatcgccggtcgtcataaggaactaaagcgctatagagtagacattaatagaatgaagaatgcctacatatcaggcgtctccatgtttgatatattatttaaacgaagcaaacgccacagattgagatacgcaaagaatccgacatcaaatggtacaaaaaagaactaacgtccatcattacagaaactgtaaagaacaatgagaggatcgactccatagtggacaacattaatacagacgataacttgatttcgaaattacccatggagatactttattactccattaaataatttatcatggagcgataatgtcctgtttcatttgtttccatgacatattacaaaatcgattccgtccaagatgataaaaacatttaccggcatcataaacacggagtttattttatatgtctcgcataaacattactaaaaaaatatattgttcggttttctttcacatctttaattatgaaaaagtaaatcattatgagatggacgagattgtacgcatcgttcgcgacagtatgtggtacatacctaacgtatttatggacgacggtaagaatgaaggtcacgtttctgtcaacaatgtctgtcatatgtattttacgttctttgatgtggatacatcgtctcatctgtttaagctagttattaaacactgcgatctgaataaacgaggtaactctccattacattgctatacgatgaatacacgatttaatccatctgtattaaagatattgttacaccacggcatgcgtaactttgatagcaaggatgaccactatcaatcgataacaagatctttgatatactaacggacaccattgatgactttagtaaatcatccgatctattgctgtgttatcttagatataaattcaatgggagcttaaactattacgttctgtacaaaggatccgaccctaattgcgccgacgaggatgaactcacttctcttcattactactgtaaacacatatccacgttctacgaaagcaattattacaagttaagtcacactaagatgcgagccgagaagcgattcatctacgcgataatagattatggagcaaacattaacgcggttacacacttaccttcaacagtataccaaacatagtcctcgtgtggtgtatgctcttttatctcgaggagccgatacgaggatacgtaataatcttgattgtacacccatcatggaacgattgtgcaacaggtcatattctcataatgttactcaattggcacgaacaaaaggaagaaggacaacatctactttatctattcataaaacataatcaaggatacactctcaatatactacggtatctattagataggttcgacattcagaaagacgaatactataataccgcctttcaaaattgtaacaacaatgttgcctcatacatcggatacgacatcaaccttccgactaaagacggtattcgacttggtgtttgaaaacagaaacatcatatacaaggcggatgttgtgaatgacatcatccaccacagactgaaagtatctctacctatgattaaatcgttgttctacaagatgtctctccctacgacgattactacgtaaaaaagatactagcctactgcctattaagggacgagtcattcgcggaactacatagtaaattctgtttaaacgaggactataaaagtgtatttatgaaaaatatatcattcgataagatagattccatcatcgtgacataagtcgcctcaaagagattcgaatctccgacaccgacctgtatacggtatcacagctatcttaaagccatacattcagacagtcacatttcatttcccatgtacgacgatctcatagaacagtgccatctatcgaaactcgtcgacaaagcactcaataaattagagtctaccatcgatggccaatctagactatcgtatttgcctccggaaattatgcgcaatatcatctaaacagtatgttgtacggaaagaaccattacaaatattatccatgattggagaagtaggaaacaggaacaagacaacgattactacattattaaattatgaagtccgtattatactcgtatatattgtttctctcatgtataataataaacggaagagatatagcaccgcatgcaccatccgatggaaagtgtaaagacaacgaatacaaacgccataatctgtgtccgggaacatacgcttccagattatgcgatagcaagactaacacacgatgtacgccgtgtggttcgggtaccttcacatctcgcaataatcatttacccgcttgtctaagttgtaacggaagacgcgatcgtgtaacacgactcacaatagaatctgtgaatgctctcccggatattattgtcttctcaaaggatcatccggatgcaaggcatgtgtttcccaaacaaaatgtggaataggatacggagtatccggagacgtcatctgttctccgtgtggtctcggaacatattctcacaccgtctcttccgcagataaatgcgaacccgtacccagaaatacgtttaactatatcgatgtggaaattaacctgtatccagttaacgacacgtcgtgtactcggacgaccactaccggtctcagcgaatccatctcaacgtcggaactaactattactatgaatcataaagactgtaatcccgtatttcgtgatggatacttctccgttcttaataaggtagcgacttcaggtttctttacaggagaaaggtgtgcactctgaatttcgagattaaatgcaataacaaagattcttcctccaaacagttaacgaaagcaaagaatgatactatcatgccgcattcggagacagtaactctagtgggcgacatctatatactatatagtaataccaatactcaagactacgaaactgatacaatctcttatcatgtgggtaatgttctcgatgtcgatagccatatgcccggtagttgcgatatacataaactgatcactaattccaaacccacccactttttatagtaagtttttcacccataaataataaatacaataattaatttctcgtaaaagtagaaaatatattctaatttattgcacggtaaggaagtagaatcataaagaacagtactcaatcaatagcaattatgaaacaatatatcgtactggcatgcatgtgcctggcggcagctgctatgcctgccagtcttcagcaatcatcctcatcctcctcctcgtgtacggaagaagaaaacaaacatcatatgggaatcgatgttattatcaaagtcacaaagcaagaccaaacaccgaccaatgataagatttgccaatccgtaacggaaattacagagtccgagtcagatccagatcccgaggtggaatcagaagatgattccacatcagtcgaggatgtagatcctcctaccacttattactccatcatcggtggaggtctgagaatgaactttggattcaccaaatgtcctcagattaaatccatctcagaatccgctgatggaaacacagtgaatgctagattgtccagcgtgtccccaggacaaggtaaggactctcccgcgatcactcatgaagaagctcttgctatgatcaaagactgtgaagtgtctatcgacatcagatgtagcgaagaagagaaagacagcgacatcaagacccatccagtactcgggtctaacatctctcataagaaagtgagttacgaagatatcatcggttcaacgatcgtcgatacaaaatgcgtcaagaatctagagtttagcgttcgtatcggagacatgtgcaaggaatcatctgaacttgaggtcaaggatggattcaagtatgtcgacggatcggcatctgaaggtgcaaccgatgatacttcactcatcgattcaacaaaactcaaagcgtgtgtctgaatcgataactctattcatctgaaattggatgagtagggttaatcgaacgattcaggcacaccacgaattaaaaaagtgtaccggacactatattccggtttgcaaaacaaaaatgttcttaactacattcacaaaaagttacctctcgcgacttcttctttttctgtctcaatagtgtgatacgattatgacactattcctattcctattcctatttcctttcagagtatcacaaaaatattaaacctctttctgatggtctcataaaaaaagttttacaaaaatatttttattctctttctctctttgatggtctcataaaaaaagttttacaaaaatatttttattctctttctctctttgatggtctcataaaaaaagttttacaaaaatatttttattctctttctctctttgatggtctcataaaaaaagttttacaaaaatatttttattctctttctctctttgatggtctcataaaaaaagttttacaaaaatatttttattctctttctctctttgatggtctcataaaaaaagttttacaaaaatatttttattctctttctctctttgatggtctcataaaaaaagttttacaaaaatatttttattctctttctctctttgatggtctcataaaaaaagttttacaaaaatatttttattctctttctctctttgatggtctcataaaaaaagttttacaaaaatatttttattctctttct

SEQ ID NO: 5 - DNA, 188863 bp, Artificial Sequence
  LIVP 5.1.1
cgattaaaactttttttatgagaccatcaaagagagaaagagaataaaaatatttttgtaaaactttttttatgagaccatcaaagagagaaagagaataaaaatatttttgtaaaactttttttatgagaccatcaaagagagaaagagaataaaaatatttttgtaaaactttttttatgagaccatcaaagagagaaagagaataaaaatatttttgtaaaactttttttatgagaccatcaaagagagaaagagaataaaaatatttttgtaaaactttttttatgagaccatcaaagagagaaagagaataaaaatatttttgtaaaactttttttatgagaccatcaaagagagaaagagaataaaaatatttttgtaaaactttttttatgagaccatcaaagagagaaagagaataaaaatatttttgtaaaactttttttatgagaccatcaaagagagaaagagaataaaaatatttttgtaaaactttttttatgagaccatcaaagagagaaagagaataaaaatatttttgtaaaactttttttatgagaccatcaaagagagaaagagaataaaaatatttttgtaaaactttttttatgagaccatcaaagagagaaagagaataaaaatatttttgtaaaactttttttatgagaccatcaaagagagaaagagaataaaaatatttttgtaaaactttttttatgagaccatcaaagagagaaagagaataaaaatatttttgtaaaactttttttatgagaccatcaaagagagaaagagaataaaaatatttttgtaaaactttttttatgagaccatcaaagagagaaagagaataaaaatatttttgtaaaactttttttatgagaccatcaaagagagaaagagaataaaaatatttttgtaaaactttttttatgagaccatcaaagagagaaagagaataaaaatatttttgtaaaactttttttatgagaccatcagaaagaggtttaatatttttgtgatactctgaaaggaaataggaataggaataggaatagtgtcataatcgtatcacactattgagacagaaaaagaagaagtcgcgagaggtaactttttgtgaatgtagttaagaacatttttgttttgcaaaccggaatatagtgtccggtacacttttttaattcgtggtgtgcctgaatcgttcgattaaccctactcatccaatttcagatgaatagagttatcgattcagacacacgctttgagttttgttgaatcgatgagtgaagtatcatcggttgcaccttcagatgccgatccgtcgacatacttgaatccatccttgacctcaagttcagatgattccttgcacatgtctccgatacgaacgctaaactctagattcttgacgcattttgtatcgacgatcgttgaaccgatgatatcttcgtaactcactttcttatgagagatgttagacccgagtactggatgggtcttgatgtcgctgtctttctcttcttcgctacatctgatgtcgatagacacttcacagtctttgatcatagcaagagcttcttcatgagtgatcgcgggagagtccttaccttgtcctggggacacgctggacaatctagcattcactgtgtttccatcagcggattctgagatggatttaatctgaggacatttggtgaatccaaagttcattctcagacctccaccgatgatggagtaataagtggtaggaggatctacatcctcgactgatgtggaatcatcttctgattccacctcgggatctggatctgactcggactctgtaatttccgttacggattggcaaatcttatcattggtcggtgtttggtcttgctttgtgactttgataataacatcgattcccatatgatgtttgttttcttcttccgtacacgaggaggaggatgaggatgattgctgaagactggcaggcatagcagctgccgccaggcacatgcatgccaggacgatatattgtttcataattgctattgattgagtactgttctttatgattctacttccttaccgtgcaataaattagaatatattttctacttttacgagaaattaattattgtatttattatttatgggtgaaaaacttactataaaaagtgggtgggtttggaattagtgatcagtttatgtatatcgcaactaccgggcatatggctatcgacatcgagaacattacccacatgataagagattgtatcagtttcgtagtcttgagtattggtattactatatagtatatagatgtcgcccactagagttactgtctccgaatgcggcatgatagtatcattctttgctttcgttaactgtttggaggaagaatctttgttattgcatttaatctcgaaattcagagtgcacacctttctcctgtaaagaatcctgaagttgctaccttattaagaacggagaagtatccatcacgaaagacgggattacagtctttatgattcatagtaatagttagttccgacgttgagatggattcgctgagaccggtagtggtcgtccgagtacacgacgtgtcgttaactggatacaggttaatttccacatcgatatagttaaacgtatttctgggtacgggttcgcatttatctgcggaagagacggtgtgagaatatgttccgagaccacacggagaacagatgacgtctccggatactccgtatcctattccacattttgtttgggaaacacatgccttgcatccggatgatcctttgagaagacaataatatccgggagagcattcacagattctattgtgagtcgtgttacacgatcgcgtcttccgttacaacttagacaagcgggtaaatgattattgcgagatgtgaaggtacccgaaccacacggcgtacatcgtgtgttagtcttgctatcgcataatctggaagcgtatgttcccggacacaaattatggcgtttgtattcgttgtctttacactttccatcggatggtgcatgcggtgctatatctcttccgtttattattatacatgagagaaacaatatatacgagtataatacggacttcatgatttaataatgtagtaatcgttgtcttgttcctgtttcctacttctccaatcatatagatattttctttctatcatggataatatttgtaatggttctttccgtacaacatactgtttagatgatattgcgcataatttccggaggcaaatacgatagtctagattgaccgatggtagactctaatttattgagtgctttgtcgacgagtttacttttacgctccatcgatagatggcactgttctatgagatcgtcgtacatgggaaatgaaatgtgactgtctgaatgtatggctttaagatagctgtgataccgtatacaggtcggtgtcggagattcgaatctctttgaggcgacttatgtcacgatgatggaatctatcttatcgaatgatatatttttcataaatacacttttatagtcctcgtttaaacagaatttactatgtagttccgcgaatgactcgtcccttaataggcagtaggctagtatcttttttacgtagtaatcgtcgtagggagagacatcttgtagaacaacgatttaatcataggtagagatactttcagtctgtggtggatgatgtcattcacaacatccgccttgtatatgatgtttctgttttcaaacaccaagtcgaataccgtctttagtcggaaggttgatgtcgtatccgatgtatgaggcaacattgttgttacaattttgaaaggcggtattatagtattcgtctttctgaatgtcgaacctatctaatagataccgtagtatattgagagtgtatccttgattatgttttatgaatagataaagtagatgttgtccttcttccttttgttcgtgccaattgagtaacattatgagaatatgacctgttgcacaatcgttccatgatgggtgtacaatcaagattattacgtatcctcgtatcggctcctcgagataaaagagcatacaccacacgaggactatgtttggtatactgttgaaggtaagtgtgtaaccgcgttaatgtttgctccataatctattatcgcgtagatgaatcgcttctcggctcgcatcttagtgtgacttaacttgtaataattgctttcgtagaacgtggatatgtgtttacagtagtaatgaagagaagtgagttcatcctcgtcggcgcaattagggtcggatcctttgtacagaacgtaatagtttaagctcccattgaatttatatctaagataacacagcaatagatcggatgatttactaaagtcatcaatggtgtccgttagtatatcaaagatcttgttatcgattgatagtggtcatccttgctatcaaagttacgcatgccgtggtgtaacaatatctttaatacagatggattaaatcgtgtattcatcgtatagcaatgtaatggagagttacctcgtttattcagatcgcagtgtttaataactagcttaaacagatgagacgatgtatccacatcaaagaacgtaaaatacatatgacagacattgttgacagaaacgtgaccttcattcttaccgtcgtccataaatacgttaggtatgtaccacatactgtcgcgaacgatgcgtacaatctcgtccatctcataatgatttactttttcataattaaagatgtgaaagaaaaacagaacaatatatttttttagtaatgtttatgcgagacatataaaataaactccgtgtttatgatgccggtaaatgtttttatcatcttggacggaatcgattttgtaatatgtcatggaaacaaatgaaacaggacattatcgctccatgataaattatttaatggagtaataaagtatctccatgggtaatttcgaaatcaagttatcgtctgtattaatgttgtccactatggagtcgatcctctcattgttctttacagtttctgtaatgatggacgttagttcttttttgtaccatttgatgtcggattctttgcgtatctcaatttgtggcgtttgcttcgtttaaagaatatatcaaacatggagacgcctgatatgtagacattcttcattctattaatgtctactctatagcgctttagttccttatgacgaccggagatatcatactttactttagaaggaaaatcatcatctaggattaaggcgtatctgatacaggcgaataatggttcaggatatagatagcgtatatctctattaaatgcgtcaatcatagtctctagagtgggatggtagctaagtaataaatcaactatcctcgttttgttttctctttggtaactgcttttctggatggccgtattgattatcgagcgtgacactcgctccatattccaataaccgctttgcaaattgtatattattgacatcgaccgcgtaatatagtagagttatcgatcatatctatatcatccatgtacttgcttagtatatcaaatacatctatcagtatggtttcataacagtgatacccgcaattattaaatctcgataatatcagaccgtacatacatagacggccattgttagatatgtgatttacagccgcgtgtccatattttccacgataaaccttacgacgtttacatcgacgagattattattaacaaagtagtcgtgtagaggatagttgttgtccgtcgtcttatccatggttgctccgttatccaacatgcattgaatgataggtatacttaccatatcgccgtaatgtaagtagtttatcaacatggcttgtacatcctgttgtctaaatctctttagaatgttatcgatgatgtagtggttatattctctggaatcgtacgaagtaatactacgcattacgtcgacaagagtatgacgtctctcaataagaagattaacgatttccatgtctacattatatggggttactctaaatcgcttgtttagataatacgcctctaatatagggctgacgtcgtatactctacacgtgtccacatcctttattaataatttaacaatctctatatctatggttgagcaagaccagtagtattggatgggtaaagatcctccttcgtctctgccatggatggaaacattgttatcgatcaaacatttaattacatccttggatagagattgagattctctatgagacgatatatagtaatgaagagagttcttacacatatcactgtcgtacatacaggtacgaaatacgtaaccggtgctgtaacattctgatttaagaagccatagcaatacttctggtctcggattaggcgtcgttacgtatatatccaccaatccgagaccattgattgcataattcgtattcttggacggacgtatccgtttatccacaattaggtattttagcagacgtaagtcgatattatccgaatacagatcgaaatcatttatattcgacttgagttcgttagaggaattcgaatagctggatatcagtagatgcacaatctgagatttgacgtatctatgcttactgtatgctcctagcggagttaatccttcgttgtttctacaaagtctctcgactccgcgagagagtaacagccgaacaatcttaatgtctgtatcgcatttattgaagacgtaacaatgtagcgcattgtttcctcgtctatctatatgttttgataagttgtgacacgtttcaatctctggttttatttttttgtacgtcacatcttcatccagtagacgacatagaatagtgcactctctaccacaataatccatagctattctggtgctaattattcctatttcacgaaggcaatcattcctcataagatgataaaaagtgtagtgagagagcatgaaggagatttagtatttagcagtgcggatatgatccaagagggtgagatagtcgttctcgttcagaatctttcgcagcataagtagtatgtcgatatacttatcgttgaagactctttataaaagtctatttgtttatatttattgcggatagcagtatttccctataaaaagtatacgtcctgtggtgtctttaatcatgtacatgaatggatggtttatgtagaccttcgtacgatataccatcgaaaagttaatcgtaaatactcctgtaacggccgatgcttctgtatactcctcattaacatctataaacgtcgtatgtagaaatttttctacagtgatagtttcattacacatcttgctaaaatctgcataatatccgaatatattagtaagtcctaaattttctaaaatcggtaccagattatacggttctgtcatttccactttaaactttggcatatacaagtctatacttttagtagataacataccacaccattttttaaatttttcatctgttatatttttttctatgttatatataccttctatgtcgtccggtagtataattaccatactagagtttccctcgtatggaatatcgataatagagaatcctccgaataattcattaatatgtacatattgcaagttattctcggtacccaccatcatatcaacgctggtaactatattcttagaaatataaaacttgtctgtatatgtaagatgtttagaaaatggatatttccacattgctttaaaatggacggcgctaacaactgtcatacgagtattaatggatagcggactagtcaataaggaattaattttaccatttgtcattgtcttaacccattcgttgattagttcctttgtttggttagcattattaaagtttacagtttgaaaatcgtcttttattttttgtaggaaggaggcgtggaactcgatactatcgctaccgtatattttatttgcggtagctagtgtcgcacaatacggaatatctacctccatgtcatcattattgtcatcgggtgtattctcattcatattctctatatattttgatagttgttcagctgtagaaccagctgctccatgatttagaatagataaagtagataaaatggaaactggagaaatcaaaacattttcatcagggtgttttaagattagttctttaaagatatccatggtatagacctaacgataacgatatatatcataaataaataatgttaaatttcaatttatgtttgtaccccgtattcatacttaacaaattggtattgcgtacacaatcaatcatattacataccattaataatgcaagcataaaaaattgttagtagatgtttctaaatataggttccgtaagcaaagaatataagaatgaagcggtaatgataaaatcaatcgttatctaaaatgatcatactcatttattttattctattatattaacacatacatttttaacagcaacacattcaatattgtattgttatttttatattatttacacaattaacaatatattattagtttatattactgaattaataatataaaattcccaatcttgtcataaacacacactgagaaacagcataaacacagaatccatcaaaaatgttgataaattatctgatgttgttgttcgctgctatgataatcagatcattcgccgatagtggtaacgctatcgaaacgacattgccagaaattacaaacgctacaacagatattccagctatcagattatgcggtccagagggagatggatattgtttacacggtgactgtatccacgctagagatattgacggtatgtattgtagatgctctcatggttatacaggcattagatgtcagcatgtagtattagtagactatcaacgttcagaaaacccaaacactacaacgtcatatatcccatctcccggtattatgcttgtattagtaggcattattatgtgttgtctattatctgtttataggttcactcgacgaactaaactacctatacaagatatggttgtgccataatttttataaatttttttatgagtatttttacaaaaatgtataaagtgtatgtcttatgtatatttataaaaatgctaagtatgcgatgtatctatgttatttgtatttatctaaacaatacctctacctctagatattatacaaaaattttttatttcggcatattaaagtaaaatctagttaccttgaaaatgaatacagtgggtggttccgtatcaccagtaagaacataatagtcaaatacagtatccgattgagattttgcatacaatactagtctagaaagaaatttgtaatcatcttctgtgacgggagtccatatatctgtatcatcgtctagtttatcagtgtcccatgctatattcctgttatcatcattagttaatgaaaataactctcgtgcttcagaaaagtcaaatattgtatccatacatacatctccaaaactatcgcttatacgtttatctttaacgatacctatacctagatggttatttactaacagacattttccagatctattgactataactcctatagtttccacatcaaccaagtaatgatcatctattgttatataacaataacataactcttttccatttttatcagtatgtatatctatatcaacgtcgtcgttgtagtgaatagtagtcattgatctattatatgaaacggatatgtctagaacggcaattgttttacgtccagttaacactttcgttgatttaaagtctagagtctttgcaaacataatatccttatccgactttatatttcctgtagggtggtataattttattttgcctccacatatcggtgtttccaaatatattactagacaatattccatatagttattagttaagggtacccaattagaacacgtacgcttattatcatcatttggatcgtatttcataaaagttattgtgttatcgatgtcaacacattctacattttttaatcgtctatatagtatttttctgatattttctataatatcagaattgtcttccatcggaagttgtatactatcggaatcagttacatgtttaaataattctctgatgtcattccttatacaatcaaattcattattaaacagtttaatagtctgtagacctttatcgtcgtaaatatccattgtcttattagttacgcttatttttatgtgtttttacgttgctttattatattttataagaatgattgtttgacgaatcacgagaactattaagacacattattaggtatatattataaaaaagtttttgattacgatgttataagaggaaagaggacacattaacatcatacatcaattaactacattcttataacatcgtaatcaaaagaattgcaattttgatgtataacaactgtcaatgggttatggaattgtatattacatattatacggtatgttggtaacgacaaataccggtcggtaattgtctgccggtgtaatagaattatatatatctatctattacaccggccttgtatacataataataagttgtggtagtatgatctccatatttataatttaggactttgtattcagtatttttggaatcataaaaaataaaaaaaagttttactaatttaaaatttaaaaagtatttacatttttttcactgtttagtcgcggatatggaattcgatcctgccaaaatcaatacatcatctatagatcatgtaacaatattacaatacatagatgaaccaaatgatataagactaacagtatgcattatccgaaatattatatcaatatcacaaaaataaatacacatttggctaatcaatttcgggcttggaaaaaacgtatcgccggaagggactatatgactaacttatctagagatacaggaatacaacaatcaaaacttactgaaactatacgtaactgtcaaaaaaatagaaacatatatggtctatatatacactacaatttagttattaattggataaccgatgtgattatcaatcaatattaagagggttggtaaattggtacatagctaataatacctatacacccaataatacaacaaccatttctgagttggatatcatcaaaatactaaataaatacgaggacgtgtatagagtaagtaaagaaaaagaatgtggaatttgctatgaagttgtttactcaaaacgatagatactttggtttattggattcgtgtactcatatattttgcataacatgcatcaatatatggcatagaacacgaagagaaaccggtgcgtcggataattgtcctatatgccgtacccgttttagaaacataacaatgagcaagttctataagctagttaactaataaataaaaagtttaatttgttgacgacgtatgtcgttattttttctcgtataaaagattaaattcaattcaattcgttgtttctaatataatctgccgtattggatggattctcaagacaattgcatttagattatattatcatgaataaaaatagtagcacacaactacttcagcaaacattctttttataaatgccatctagcgtagcgaggacacaagtgaacctataattatcaaatttattagtatcggttacatgaaggactttacgtagagtgacgattccactatctgtggtacgaacggtttcatcttctttgatgccatcacccagatgttctataaacttggtatcctcgtccgatttcatatcctttgccaaccaatacatatagctaaactcaggcatatgttccacacatcctgaacaatgaaattctccagaagatgttacaatgtctagatttggacatttggtttcaaccgcgttaacatatgagtgaacacacccatacatgaaagcgatgagaaataggattctcatcttgccaaaatatcactagaaaaaatttatttatcagttttaaaggtataaaaaatacttattgttgctcgaatattttgtatttgatggtatacggaagattagaaatgtaggtattatcatcaactgattctatggttttatgtattctatcatgtttcactattgcgttggaaataatatcatatgcttccacatatattttattttgttttaactcataatactcacgtaattctggattattggcatatctatgaataattttagctccatgatcagtaaatattaatgagaacatagtattaccacctaccattatttttttcatctcattcaattcttaattgcaaagatctatataatcattatagcgttgacttatggactctggaatcttagacgatgtacagtcatctataatcatggcatatttaatacattgttttatagcatagtcgttatctacgatgttagatatttctctcaatgaatcaatcacacaatctaatgtaggtttatgacataatagcattttcagcagttcaatgtttttagattcgttgatggcaatggctatacatgtatatccgttatttgatctaatgttgacatctgaaccggattctagcagtaaagatactagagattgtttattatatctaacagccttgtgaagaagtgtttctcctcgtttgtcaatcatgttaatgtctttaagataaggtaggcaaatgtttatagtactaagaattgggcaagcataagacatgtcacaaagacccttttttgtatgtataagtgtaaaaattataacatccatagttggatttacataggtgtccaatcgggatctctccatcatcgagataattgatggcatctcccttccttttttagtagatatttcatcgtgtaagaatcaatattaatatttctaaagtatccgtgtatagcctctttatttaccacagctccatattccactagagggatatcgccgaatgtcatatactcaattagtatatgttggaggacatccgagttcattgttttcaatatcaaagagatggtttccttatcatttctccatagtggtacaatactacacattattccgtgcggctttccattttccaaaaacaatttgaccaaatctaaatctacatctttattgtatctataatcactatttagataatcagccataattcctcgagtgcaacatgttagatcgtctatatatgaataagcagtgttatctattcctttcattaacaatttaacgatgtctatatctatatgagatgacttaatataatattgaagagctgtacaatagtttttatctataaaagacggcttgattccgtgattaattagacatttaacaacttccggacgcacatatgctctcgtatccgactctgaatacagatgagagatgatatacagatgcaatacggtaccgcaatttcgtagttgataatcatcatacgcgtatcagtactcgtcctcataaagaacactgcagccattttctatgaacaaatcaataattttagaaacaggatcattgtcattacataattttctataactgaacgatggttttcacatttaacactcaagtcaaatccatgttctaccaacacctttatcaagtcaacgtctacatttttggatttcatatagctgaatatattaaagttatttatgttgctaaatccagtggcttctagtagagccatcgctatatccttattaactttaacatgtctactatttgtgtattcttctaatggggtaagctgtctccaatttttgcgtaatggattagtgccactgtctagtagtagtttgacgacctcgacattattacaatgctcattaaaaaggtatgcgtgtaaagcattattcttgaattggttcctggtatcattaggatctctgtctttcaacatctgtttaagttcatcaagagccacctcctcattttccaaatagtcaaacattttgactgaatgagctactgtgaactctatacacccacacaactaatgtcattaaatatcatgtcaaaaacttgtacaattattaataaaaataatttagtgtttaaattttaccagttccagattttacacctccgttaatacctccattaaccccactggacgatcctcctccccacattccaccgccaccagatgtataagttttagatcctttattactaccatcatgtccatggataaagacactccacatgccgccactaccccctttagaagacatattaataagacttaaggacaagtttaacaataaaattaatcacgagtaccctactaccaacctacactattatatgattatagtttctatttttacagtaccttgactaaagtttctagtcacaagagcaatactaccaacctacactattatatgattatagtttctatttttataggaacgcgtacgagaaaatcaaatgtctaatttctaacggtagtgttgataaacgattatcgtcaatggatacctcctctatcatgtcgtctattttcttactttgttctattaacttattagcattatatattatttgattataaaacttatattgcttattagcccaatctgtaaatatcggattattaacatatcgtttctttgtaggtttatttaacttgtacatcactgtaagcatgtccttaccatttattttaatttgacgcatatccgcaatttctttttcgcagtcggttataaattctatatatgatggatacatgctacatgtgtacttataatcgactaatatgaagtacttgatacatattttcagtaacgatttattattaccacctatgaataagtacctgtgatcgtctaggtaatcaactgttttcttaatacattcgatggttggtaatttactcagaataatttccaatatcttaatatataattctgctatttctgggatatatttatctgccagtataacacaaatagtaatacatgtaaacccatattttgttattatattaatgtctgcgccattatctattaaccattctactaggctgacactatgcgactcaatacaatgataaagtatactacatccatgtttatctattttgtttatatcattaatatacggcttacaaagttttagtatcgataacacatccaactcacgcatagagaaggtagggaataatggcataatatttattaggttatcatcattgtcattatctacaactaagtttccattttttaaaatatactcgacaactttaggatctctattgccaaatttttgaaaatatttatttatatgcttaaatctatataatgtagctccttcatcaatcatacatttaataacattgatgtatactgtatgataagatacatattctaacaatagatcttgtatagaatctgtatatcttttaagaattgtggatattaggatattattacataaactattacacaattctaaaatataaaacgtatcacggtcgaataatagttgatcaactatataattatcgattttgtgatttttcttcctaaactgtttacgtaaatagttagatagaatattcattagttcatgaccactatagttactatcgaataacgcgtcaaatatttcccgtttaatatcgcatttgtcaagataataatagagtgtggtatgttcacgataagtataataacgcatctctttttcgtgtgaaattaaatagtttattacgtccaaagatgtagcataaccatcttgtgacctagtaataatataataatagagaactgttttacccattctatcatcataatcagtggtgtagtcgtaatcgtaatcgtctaattcatcatcccaattataatattcaccagcacgtctaatctgttctattttgatcttgtatccatactgtatgttgctacatgtaggtattcctttatccaataatagtttaaacacatctacattgggatttgatgttgtagcgtatttttctacaatattaataccatttttgatactatttatttctatacctttcgaaattagtaatttcaataagtctatattgatgttatcagaacatagatattcgaatatatcaaaatcattgatatttttatagtcgactgacgacaataacaaaatcacaacatcgtttttgatattattatttttcttggtaacgtatgcctttaatggagtttcaccatcatactcatataatggatttgcaccactttctatcaatgattgtgcactgctggcatcgatgttaaatgttttacaactatcatagagtatcttatcgttaaccatgattggttgttgatgctatcgcattttttggtttctttcatttcagttatgtatggatttagcacgtttgggaagcatgagctcatatgatttcagtactgtagtgtcagtactattagtttcgatcagatcaatgtctagatctatagaatcaaaacacgataggtcagaagataatgaatatctgtacgcttctttttgtactgtaacttctggttttgttagatggttgcatcgtgctttaacgtcaatggtacaaattttatcctcgctttgtgtatcatattcgtccctactataaaattgtatattcagattatcatgcgatgtgtatacgctaacggtatcaataaacggagcacaccatttagtcataaccgtaatccaaaaatttttaaagtatatcttaacgaaagaagttgtgtcattgtctacggtgtatggtactagatcctcataagtgtatatatctagagtaatgtttaatttattaaatggttgataatatggatcctcgtgacaatttccgaagatggaaataagacataaacacgcaataaatctaattgcggacatggttactccttaaaaaaatacgaataatcaccttggctatttagtaagtgtcatttaacactatactcatattaatccatggactcataatctctatacgggattaacggatgttctatatacggggatgagtagttctcttctttaactttatactttttactaatcatatttagactgatgtatgggtaatagtgtttgaagagctcgttctcatcatcagaataaatcaatatctctgtttttttgttatacagatgtattacagcctcatatattacgtaatagaacgtgtcatctaccttattaactttcaccgcatagttgtttgcaaatacggttaatcctttgacctcgtcgatttccgaccaatctgggcgtataatgaatctaaactttaattgcttgtaatcattcgaaataatttttagtttgcatccgtagttatcccctttatgtaactgtaaatttctcaacgcgatatctccattaataatgatgtcgaattcgtgctgtatacccatactgaatggatgaacgaataccgacggcgttaatagtaatttactttttcatctttacatattgggtactagttttactatcataagtttataaattccacaagctactatggaataagccaaccatcttagtataccacacatgtcttaaagtttattaattaattacatgttgttttatatatatcgctacgaatttaaagagaaattagtttaggaagaaaaattatctatctacatcatcacgtctctgtattctacgatagagtgctactttaagatgcgacagatccgtgtcatcaaatatatactccattaaaatgattattccggcagcgaacttgatattggatatatcacaacctttgttaatatctacgacaatagacagcagtcccatggttccataaacagtgagtttatctttctttgaagagatattttgtagagatcttataaaactgtcgaatgacatcgcatttatatctttagctaaatcgtatatgttaccatcgtaatatctaaccgcgtctatcttaaacgtttccatcgctttaaagacgtttccgatagatggtctcatttcatcagtcatactgagccaacaaatataatcgtgtataacatctttgatagaatcagactctaaagaaaacgaatcggctttattatacgcattcatgataaacttaatgaaaaatgtttttcgttgtttaagttggatgaatagtatgtcttaataattgttattatttcattaattaatatttagtaacgagtacactctataaaaacgagaatgacataactaatcataactagttatcaaagtgtctaggacgcgtaattttcatatggtatagatcctgtaagcattgtctgtattctggagctattttctctatcgcattagtgagttcagaatatgttataaatttaaatcgaataacgaacataactttagtaaagtcgtctatattaactcttttattttctagccatcgtaataccatgtttaagatagtatattctctagttactacgatctcatcgttgtctagaatatcacatactgaatctacatccaattttagaaattggtctgtgttacatatctcttctatattattgttgatgtattgtcgtagaaaactattacgtagaccattttctttataaaacgaatatatagtactccaattatctttaccgatatatttgcacacataatccattctctcaatcactacatctttaagattttcgttgttaagatatttggctaaactatataattctattagatcatcaacagaatcagtatatatttttctagatccaaagacgaactctttggcgtcctctataatattcccagaaaagatattttcgtgttttagtttatcgagatctgatctgttcatatacgccatgattgtacggtacgttatgataaccgcataaaataaaaatccattttcatttttaaccaatactattcataattgagattgatgtaatactttgttactttgaacgtaaagacagtacacggatccgtatctccaacaagcacgtagtaatcaaatttggtgttgttaaacttcgcaatattcatcaatttagatagaaacttatactcatcatctgttttaggaatccatgtattattaccactttccaacttatcattatcccaggctatgtttcgtccatcatcgttgcgcagagtgaataattcttttgtattcggtagttcaaatatatgatccatgcatagatcggcaaagctattgtagatgtgatttttcctaaatctaatataaaactcgtttactagcaaacactttcctgatttatcgaccaagacacatatggtttctaaatctatcaagtggtggggatccatagttatgacgcagtaacatatattattacattcttgactgtcgctaatatctaaatatttattgttatcgtattggattctgcatatagatggcttgtatgtcaaagatatagaacacataaccaatttatagtcgcgctttacattctcgaatctaaagttaagagatttagaaaacattatatcctcggatgatgttatcactgtttctggagtaggatatattaaagtctttacagatttcgtccgattcaaataaatcactaaataatatcccacattatcatctgttagagtagtatcattaaatctattatattttatgaaagatatatcactgctcacctctatatttcgtacatttttaaactgtttgtataatatctctctgatacaatcagatatatctattgtgtcggtagacgataccgttacatttgaattaatggtgttccattttacaacttttaacaagttgaccaattcatttctaatagtatcaaactctccatgattaaatattttaatagtatccattttatatcactacggacacaaagtagctgacataaaccattgtataatttttatgttttatgtttattagcgtacacattttggaagttccggcttccatgtatttcctggagagcaagtagatgatgaggaaccagatagtttatatccgtacttgcacttaaagtctacattgtcgttgtatgagtatgatcttttaaacccgctagacaagtatccgtttgatattgtaggatgtggacatttaacaatctgacacgtgggtggatcggaccattctcctcctgaacacaggacactagagttaccaatcaacgaatatccactattgcaactataagttacaacgcttccatcggtataaaaatcctcgtatccgttatgtcttccgttggatatagatggaggggattggcatttaacagattcacaaataggtgcctcgggattccataccatagatccagtaaatcctaattcacaatacgatttagattcaccgatcaactgatatccgctattacaagagtacgttatactagagccaaagtctactccaccaatatcaagttggccattatcgatatctcgaggcgatgggcatctccgtttaatacattgattaaagagtgtccatccagtacctgtacatttagcatatataggtcccattttttgctttctgtatccaggtagacatagatattctatagtgtctcctatgttgtaattagcattagcatcagtctccacactattcttaaatttcatattaatgggtcgtgacggaatagtacagcatgatagaacgcatcctattcccaacaatgtcaggaacgtcacgctctccaccttcatatttatttatccgtaaaaatgttatcctggacatcgtacaaataataaaaagcccatatatgttcgctattgtagaaattgtttttcacagttgctcaaaaacgatggcagtgacttatgagttacgttacactttggagtctcatctttagtaaacatatcataatattcgatattacgagttgacatatcgaacaaattccaagtatttgattttggataatattcgtattttgcatctgctataattaagatataatcaccgcaagaacacacgaacatctttcctacatggttaaagtacatgtacaattctatccatttgtcttccttaactatatatttgtatagataattacgagtctcgtgagtaattccagtaattacatagatgtcgccgtcgtactctacagcataaactatactatgatgtctaggcatgggagacttttttatccaacgatttttagtgaaacattccacatcgtttaatactacatatttctcatacgtggtataaactccacccattacatatatatcatcgtttacgaataccgacgcgcctgaatatctaggagtaattaagtttggaagtcttatccatttcgaagtgccgtgtttcaaatattctgccacacccgttgaaatagaaaattctaatcctcctattacatataactttccatcgttaacacaagtactaacttctgattttaacgacgacatattagtaaccgttttccattttttcgttttaagatctacccgcgatacggaataaacatgtctattgttaatcatgccgccaataatgtatagacaattatgtaaaacatttgcattatagaattgtctatctgtattaccgactatcgtccaatattctgttctaggagagtaatgggttattgtggatatataatcagagtttttaatgactactatattatgttttataccatttcgtgtcactggctttgtagatttggatatagttaatcccaacaatgatatagcattgcgcatagtattagtcataaacttgggatgtaaaatgttgatgatatctacatcgtttggatttttatgtatccactttaataatatcatagctgtaacatcctcatgatttacgttaacgtcttcgtgggataagatagttgtcagttcatcctttgataattttccaaattctggatcggatgtcaccgcagtaatattgttgattatttctgacatcgacgcattatatagttttttaattccatatcttttagaaaagttaaacatccttatacaatttgtgaaattaatattatgaatcatagtttttacacatagatctactacaggcggaacatcaattattatggcagcaactagtatcatttctacattgtttatggtgatgtttatcttcttccagcgcatatagtctaatagcgattcaaacgcgtgatagtttataccattcaatataatcgcttcatcctttagatggtgatcctgaatgcgtttaaaaaaattatacggagacgccgtaataatttccttattcacttgtataatttccccattgatagaaaatattacgctttccattcttaaagtactataagtaattatagtataatgtaaacgtttatatattcaatatttttataaaaatcattttgacattaattcctttttaaatttccgtctatcatctatagaaacatattctatgaatttataaaatgcttttacgtgtcctatcgtaggcgatagaaccgctaaaaagcctatcgaatttctacaaaagaatctgttatatggtatagggagagtataaaacattaaatgtccgtacttattaaagtattcagtagccaatcctaactctttcgaatacttattaatggctcttgttctgtacgaatctatttttttgaacaacggacctagtggtatatcttgttctatgtatctaaaataatgtctgactagatccgttagtttaatatccgcagtcatcttgtctagaatggcaaatctaactgcgggtttaggctttagtttagtttctatatctacatctatgtctttatctaacaccaaaaatataatagctaatattttattacaatcatccggatattcttctacgatctcactaactaatgtttctttggttatactagtatagtcactatcggacaaataaagaaaatcagatgatcgatgaataatacatttaaattcatcatctgtaagatttttgagatgtctcattagaatattattagggttagtactcattatcattcggcagctattacttattttattatttttcaccatatagatcaatcattagatcatcaaaatatgtttcaatcatcctaaagagtatggtaaatgactcttcccatctaatttctgaacgttcaccaatgtctctagccactttggcactaatagcgatcattcgcttagcgtcttctatattattaactggttgattcaatctatctagcaatggaccgtcggacagcgtcattctcatgttcttaatcaatgtacatacatcgccgtcatctaccaattcatccaacaacataagctttttaaaatcatcattataataggtttgatcgttgtcatttctccaaagaatatatctaataagtagagtcctcatgcttagttaacaactattttttatgttaaatcaattagtacaccgctatgtttaatacttattcatattttagtttttaggattgagaatcaatacaaaaattaatgcatcattaattttagaaatacttagtttccacgtagtcaatgaaacatttgaactcatcgtacaggacgttctcgtacaggacgtaactataaaccggtttatatttgttcaagatagatacaaatccgataactttttttacgaattctacgggatccactttaaaagtgtcataccgggttctttttatttttttaaacagatcaatggtgtgatgttgattaggtcttttacgaatttgatatagaatagcgtttacatattctccataatggtcaatcgccatttgttcgtatgtcataaattctttaattatatgacactgtgtattatttagttcatccttgttcattgttaggaatctatccaaaatggcaattatactagaactataggtgcgttgtatacacatattgatgtgtctgtttatacaatccatgatatttggatccatgctactaccttcgggtaaaattgtagcatcatataccatttctagtactttaggttcattattatccattgcagaggacgtcatgatcgaatcataaaaaaatatattatttttatgttattttgttaaaaataatcatcgaatacttcgtaagatactccttcatgaacataatcagttacaaaacgtttatatgaagtaaagtatctacgatttttacaaaagtccggatgcataagtacaaagtacgcgataaacggaataataatagatttatctagtctatctttttctatagctttcatagttagatacatggtctcagaagtaggattatgtaacatcagcttcgataaaatgactgggttatttagtcttacacattcgctcatacatgtatgaccgttaactacagagtctacactaaaatgattgaacaatagatagtctaccattgtttcgtattcagatagtacagcgtagtacatggcatcttcacaaattatatcattgtctaatagatatttgacgcatcttatggatcccacttcaacagccattttaaaatcggtagaatcatattgctttcctttatcattaataatttctagaacatcatctctatcataaaagatacaaatattaactgtttgatccgtaataacattgctagtcgatagcaatttgttaataagatgcgctgggctcaatgtcttaataagaagtgtaagaggactatctccgaatttgttttgtttattaacatccgttgatggaagtaaaagatctataatgtctacattcttgactgttttagagcatacaatatggagaggtgtatttccatcatgatctggttttgagggactaattcctagtttcatcatccatgagattgtagaagcttttggattgtctgacataagatgtctatgaatatgatttttgccaaatttatccactatcctggcttcgaatccgatggacattatttttttaaacactctttctgaaggatctgtacacgccaacaacggaccacatccttcttcatcaaccgagttgttaatcttggctccatactgtaccaataaatttattctctctatgacttcatcatctgttcccgagagataatatagaggcgttttatgctgtttatcacacgcgtttggatctgcgccgtgcgtcagcagcatcgcgactattctattattattaattttagaagctatatgcaatggataatttccatcatcatccgtctcatttggagagtatcctctatgaagaagttcttcgacaaatcgttcatctagtcctttaattccacaatacgcatgtagaatgtgataattatttccagaaggttcgatagcttgtagcatattcctaaatacatctaaatttttactattatatttggcataaagagatagataatactcggccaacataatgttgtccattgtagtataaaaattaatatttctatttctatttctgtatatttgcaacaatttactctctataacaaatatcataacttagttcttttatgtcaagaaggcactggtttagttcatctataaatgtcacgccataactactacgcatgccatactcagaattatgataaagatatttatccttggggtgtaggtaatggggattaatctttgttggatcagtctctaagttaacacatgtcacacatgatccatttatagttatatcacacgatgatgatttatgaattgattccggaagatcgctatcgtattttgtggttccacaattcatttccatacatgttattgtcacactaatattatgatgaactttatctagccgctgagtggtaaacaacagaacagatagtttattatctttaccaacaccctcagccgctgccacaaatctctgatccgtatccatgatggtcatgtttatttctagtccgtatccagtcaacactatgttagcatttctgtcgatatagctttcactcatatgacactcaccaataatagtagaattaatgtcgtaatttacaccaatagtgagttcggcggcaaagtaccaataccggtaatcttgtcgaggaggacatatagtattcttgtattctaccgaatacccgagagatgcgatacaaaagagtaagactaatttgtaaaccatcttactcaaaatatgtaacaatagtacgatgcaatgagtaagacaataggaaatctatcttatatacacataattattctatcaattttaccaattagttagtgtaatgttaacaaaaatgtgggagaatctaattagtttttctttacacaattgacgtacatgagtctgagttccttgtttttgctaattatttcatccaatttattattcttgacgatatcgagatcttttgtataggagtcagacttgtattcaacatgcttttctataatcattttagctatttcggcatcatccaatagtacattttccagattagcagaatagatattaatgtcgtatttgaacagagcctgtaacatctcaatgtctttattatctatagccaatttaatgtccggaatgaagagaagggaattattggtgtttgtcgacgtcatatagtcgagcaagagaatcatcatatccacgtgtccattttttatagtgatgtgaatacaactaaggagaatagccagatcaaaagtagatggtatctctgaaagaaagtaggaaacaatacttacatcattaagcatgacggcatgataaaatgaagttttccatccagttttcccatagaacatcagtctccaatttttcttaacaaacagttttaccgtttgcatgttaccactatcaaccgcataatacaatgcagtgtttcccttgtcatcaaattgtgaatcatccagtccactgaatagcaaaatctttactattttggtatcttccaatgtggctgcctgatgtaatggaaattcattctctagaagatttttcaatgctccagcgttcaacaacgtacatactagacgcacgttattatcagctattgcataatacaaggcactatgtccatggacatccgccttaaatgtatctttactagagagaaagcttttcagctgcttagacttccaagtattaattcgtgacagatccatgtctgaaacgagacgctaattagtgtatattttttcattttttatcatattgcaccagaattaataatatctctaatagatctgattagtagatacatggctatcgcaaaacaacatatacacatttaataaaaataatatttattaagaaaattcagatttcacgtacccatcaatataaataaaataatgattccttacaccgtacccatattaaggagattccaccttacccataaacaatataaatccagtaatatcatgtctgatgatgaacacaaatggtgtattaaattccagtttttcaggagatgatctcgccgtagctaccataatagtagatgcctctgctacagttccttgttcgtcgacatctatctttgcattctgaaacattttataaatatataatgggtccctagtcatatgtttaaacgacgcattatctggattaaacatactaggagccatcatttcggctatcgacttaatatccctcttattttcgatagaaaatttagggagtttaagattgtacactttattccctaattgagacgaccaatagtctaattttgcagccgtgatagaatctgtgaaatgggtcatattatcacctattgccaggtacatactaatattagcatccttatacggaaggcgtaccatgtcatattctttgtcatcgattgtgattgtatttccttgcaatttagtaactacgttcatcatgggaaccgttttcgtaccgtacttattagtaaaactagcattgcgtgttttagtgatatcaaacggatattgccatatacctttaaaatatatagtattaatgattgcccatagagtattattgtcgagcatattagaatctactacattagacataccggatctacgttctactatagaattaattttattaaccgcatctcgtctaaagtttaatctatataggccgaatctatgatattgttgataatacgacggtttaatgcacacagtattatctacgaaactttgataagttagatcagtgtacgtatatttagatgttttcagcttagctaatcctgatattaattctgtaaatgctggacccagatctctttttctcaaatccatagtcttcaataattctattctagtattacctgatgcaggcaatagcgacataaacatagaaaacgaataaccaaacggtgagaagacaatattatcatcttgaatatttttatacgctactataccggcattggtaaatccttgtagacgataggcggacgctgaacacgctaacgatagtatcaataacgcaatcatgattttatggtattaataattaaccttatttttatgttcggtataaaaaaattattgatgtctacacatccttttgtaattgacatctatatatccttttgtataatcaactctaatcactttaacttttacagttttccctaccagtttatccctatattcaacatatctatccatatgcatcttaacactctctgccaagatagcttcagagtgaggatagtcaaaaagataaatatatagagcataatcattctcgtatactctgccctttattacatcacccgcattgggcaacgaataacaaaatgcaagcatcttgttaacgggctcgtaaattgggataaaaattatgtttttattgtcttatatctattttattcaagagaatattcaggaatttctttttccggttgtatctcgtcgcagtatatatcatttgtacattgtttcatattttttaatagtttacaccttttagtaggactagtatcgtacaattcatagctgtattttgaattccaatcacgcataaaaatatcttccaattgttgacgaagacctaatccatcatccggtgtaatattaatagatgctccacatgtatccgtaaagtaatttcctgtccaatttgaggtacctatataggccgttttatcggttaccatatatttggcatggtttaccctagaatacggaatgggaggatcagcatctggtacaataaatagctttacttctatatttatgtttttagattttagcatagcgatagatcttaaaaagtttctcatgataaacgaagatcgttgccagcaactaatcaatagcttaacggatacttgtctgtctatagcggatcttcttaattcatcttctatataaggccaaaacaaaattttacccgccttcgaataaataatagggataaagttcataacagatacataaacgaatttactcgcatttctaatacatgacaataaagcggttaaatcattggttctttccatagtacatagttgttgcggtgcagaagcaataaatacagagtgtggaacgccgcttacgttaatactaagaggatgatctgtattataatacgacggataaaagtttttccaattatatggtagattgttaactccaagataccagtatacctcaaaaatttgagtgagatccgctgccaagttcctattattgaagatcgcaatacccaattccttgacctgagttagtgatctccaatccatgttagcgcttcctaaataaatatgtgtattatcagatatccaaaattttgtatgaagaactcctcctaggatatttgtaatatctatgtatcgtacttcaactccggccatttgtagtctttcaacatcctttaatggtttgttagatttattaacggctactctaactcgtactcctcttttgggtaattgtacaatctcgtttaatattatcgtgccgaaattcgtacccacttcatccgataaactccaataaaaagatgatatatctagtgtttttgtggtattggatagaatttccctccacatgttaaatgtagacaaatatactttatcaaattgcatacctataggaatagtttctgtaatcactgcgattgtattatccggattcattttatttgttaaaagaataatcctatatcacttcactctattaaaaatccaagtttctatttctttcatgactgattttttaacttcatccgtttccttatgaagatgatgtttggcaccttcataaatttttatttctctattacaatttgcatgttgcatgaaataatatgcacctaaaacatcgctaatcttattgtttgttccctggagtatgagagtcgggggggtgttaatcttggaaattatttttctaaccttgttggtagccttcaagacctgactagcaaatccagccttaattttttcatgattgactaatgggtcgtattggtatttataaactttatccatatctctagatactgattctggacatagctttccgactggcgcatttggtgtgatggttcccataagtttggcagctagcagattcagtcttgaaacagcatctgcattaactagaggagacattagaatcattgctgtaaacaagtttggattatcgtaagaggctagctcccatggaatgacccaataagtagatttaatagttaccacgtgctgtaccaaagtcatcaatcatcattttttcaccattacttcttccatgtccaatatgatcatgtgagaatactaaaattcctaacgatgatatgttttcagctagttcgtcataacgtccagaatgtttaccagctccatgacttatgaatactaatgccttaggatatgtaataggtttccaatatttacaatatatgtaatcattgtccagattgaacatacagtttgcactcatgattcacgttatataactatcaatattaacagttcgtttgatgatcatattatttttatgttttattgataattgtaaaaacatacaattaaatcaatatagaggaaggagacggctactgtcttttgtaagatagtcatggcgactaaattagattatgaggatgctgttttttactttgtggatgatgataaaatatgtagtcgcgactccatcatcgatctaatagatgaatatattacgtggagaaatcatgttatagtgtttaacaaagatattaccagttgtggaagactgtacaaggaattgatgaagttcgatgatgtcgctatacggtactatggtattgataaaattaatgagattgtcgaagctatgagcgaaggagaccactacatcaattttacaaaagtccatgatcaggaaagtttattcgctaccataggaatatgtgctaaaatcactgaacattggggatacaaaaagatttcagaatctagattccaatcattgggaaacattacagatttgatgaccgacgataatataaacatcttgatactttttctagaaaaaaaattgaattgatgatataggggtcttcataacgcataattattacgttagcattctatatccgtgttaaaaaaaattatcctatcatgtatttgagagttttatatgtagcaaacatgatagctgtgatgccaataagctttagatattcacgcgtgctagtgttagggatggtattatctggtggtgaaatgtccgttatataatctacaaaacaatcatcgcatatagtatgcgatagtagagtaaacatttttatagtttttactggattcatacatcgtctacccaattcggttataaatgaaattgtcgccaatcttacacccaaccccttgttatccattagcatagtattaacttcgttatttatgtcataaactgtaaatgattttgtagatgccatatcatacatgatattcatgtccctattataatcattactaactttatcacaatatatgttgataatatctatatatgatctagtctttgtgggcaactgtctatacaagtcgtctaaacgttgtttactcatatagtatcgaacagccatcattacatggtcccgttccgttgatagataatcgagtatgttagtggacttgtcaaatctatataccatattttctggaagtggatatacatagtcgtgatcaacattattgctagcctcatcttctatatcctgtactataccattatctatatcatctacataatctatgatattattacacataaacatcgacaacatactattgtttattatctaagtcctgttgatccaaacccttgatctcctctatttgtactatctagagattgtacttcttccagttctggataatatatacgttgatagattagctgagctattctatctccagtatttacattaaacgtacattttccattattaataagaatgactcctatgtttcccctataatcttcgtctattacaccacctcctatatcaatgccttttagtgacagaccagacctaggagctattctaccatagcagaacttaggcatggacatactaatatctgtcttaattaactgtctttctcctggagggatagtataatcgtaagcgctatacaaatcatatccggcagcacccggcgattgcctagtaggagatttagctctgttagtttccttaacaaatctaactggtgagttaatattcatgttgaacataaaactaatattttatttcaaaattatttaccatcccatatattccatgaataagtgtgatgattgtacacttctatagtatctatatacgatccacgataaaatcctcctatcaatagcagtttattatccactatgatcaattctggattatccctcggataaataggatcatctatcagagtccatgtattgctggattcacaataaaattccgcatttctaccaaccaagaataaccttctaccgaacactaacgcgcatgatttataatgaggataataagtggatggtccaaactgccactgatcatgattgggtagcaaatattctgtagttgtatcagtttcagaatgtcctcccattacgtatataacattgtttatggatgccactgctggattacatctaggtttcagaagactcggcatattaacccaagcagcatccccgtggaaccaacgctcaacagatgtgggatttggtagacctcctactacgtataatttattgttagcgggtatcccgctagcatacagtctggggctattcatcggaggaattggaatccaattgtttgatatataatttaccgctatagcattgttatgtatttcattgttcatccatccaccgatgagatatactacttctccaacatgagtacttgtacacatatggaatatatctataatttgatccatgttcataggatactctatgaatggatacttgtatgatttgcgtggttgtttatcacaatgaaatattttggtacagtctagtatccattttacattatttatacctctgggagaaagataatttgacctgattacatttttgataaggagtagcagatttcctaatttatttcttcgctttatataccacttaatgacaaaatcaactacataatcctcatctggaacatttagttcatcgctttctagaataagtttcatagatagataatcaaaattgtctatgatgtcatcttccagttccaaaaagtgtttggcaataaagtttttagtatgacataagagattggatagtccgtattctatacccatcatgtaacactcgacacaatattcctttctaaaatctcgtaagataaagtttatacaagtgtagatgataaattctacagaggttaatatagaagcacgtaataaattgacgacgttatgactatctatatatacctttccagtatacgagtaaataactatagaagttaaactgtgaatgtcaaggtctagacaaaccctcgtaactggatctttatttttcgtgtatttttgacgtaaatgtgtgcgaaagtaaggagataactttttcaatatcgtagaattgactattatattgcctcctatggcatcaataattgttttgaatttcttagtcatagacaatgctaatatattcttacagtacacagtattgacaaatatcggcatttatgtttctttaaaagtcaacatctagagaaaaatgattatctttttgagacataactcccattttttggtattcacccacacgtttttcgaaaaaattagtttttccttccaatgatatattttccatgaaatcaaacggattggtaacattataaatttttttaaatcccaattcagaaatcaatctatccgcgacgaattctatatatgttttcatcatttcacaattcattcctataagtttaactggaagagccgcagtaagaaattcttgttcaatggatactgcatctgttataatagatctaacggtttcttcactcggtggatgcaataaatgtttaaacatcaaacatgcgaaatcgcagtgcagaccctcgtctctactaattagttcgttggaaaacgtgagtccgggcattaggccacgctttttaagccaaaatatggaagcgaatgatccggaaaagaagattccttctactgcagcaaaggcaataagtctctctccataaccggcgctgtcatgtatccacttttgagcccaatcggccttcttttttacacaaggcatcgtttctatggcattaaagagatagtttttttcattactatctttaacataagtatcgatcaaaagactatacatttccgaatgaatgttttcaatggccatctgaaatccgtagaaacatctagcctcggtaatctgtacttctgtacaaaatcgttccgccaaattttcattcactattccgtcactggctgcaaaaaacgccaatacatgttttataaaatatttttcgtctggtgttagtttattccaatcattgatatctttagatatatctacttcttccactgtccaaaatgatgcttctgcctttttatacatgttccagatgtcatgatattggattgggaaaataacaaatctatttggatttggtgcaaggatgggttccataactaaattaacaataacaataaattttttttcagttatctatatgcctgtacttggatcttttgtacatcgatatcgccgcaatcactacaataattacaagtattattgatagcattgttattagtactatcataattaaattatctacattcatgggtgctgaataatcgttattatcatcattatcattttgtaattgtgacatcatactagataaatcgtttgcgagattgttgtgggaagcgggcatggaggatgcattatcattattatttaacgccttccattcggattcacaaatgttacgcacattcaacattttatggaaactataattttgtgaaaacaaataacaagaaaactcgtcatcgttcaaatttttaacgatagtaaaccgattaaacgtcgagctaatttctaacgctagcgactctgttggatatgggtttccagatatatatcttttcagttcccctacgtatctataatcatctgtaggaaatggaagatatttccatttatctactgttcctaatatcatatgtggtggtgtagtagaaccattaagcgcgaaagatgttatttcgcatcgtattttaacttcgcaataatttctggttagataacgcactctaccagtcaagtcaatgatattagcctttacagatatattcatagtagtcgtaacgatgactccatcttttagatgcgatactcctttgtatgtaccagaatcttcgtacctcaaactcgatatatttaaacaagttaatgagatattaacgcgttttatgaatgatgatatataaccagaagttttatcctcggtggctagcgctataaccttatcattataataccaactagtgtgattaatatgtgacacgtcagtgtgggtacaaatatgtacattatcgtctacgtcgtattcgatacatccgcatacagccaacaaatataaaatgacaaatactctaacgccgttcgtacccatcttgatgcggtttaataaatgttttgatttcaatttattgtaaaaaaagattcggttttatactgttcgatattctcattgcttatattttcatctatcatctccacacagtcaaatccgtggttagcatgcacctcatcaaccggtaaaagactatcggactcttctatcattataactctagaatatttaatttggtcattattaatcaagtcaattatcttatttttaacaaacgtgagtattttactcattttttataaaaacttttagaaatatacagactctatcgtgtgtctatatcttctttttatatccaatgtatttatgtctgatttttcttcatttatcatatataatggtccaaattctacacgtgcttcggattcatccagatcattaaggttcttataattgtaacatccttctcttccctcttctacatcttccttcttattcttattcttagcgtcacagaatctaccacagcaggatcccatgacgagcgtcatattaaactaatccattttcaattataatatatgattagtaatgaccattaaaataaaaaatattcttcataaccggcaagaaagtgaaaagttcacattgaaactatgtcagtagtatacatcatgaaatgatgatatatatatatactctattttggtggaggattatatgatataattcgtggataatcattcttaagacacatttcttcattcgtaaatcttttcacgttaaatgagtgtccatattttgcaatttcttcatatgatggcggtgtacgtggacgaggctgctcctgttcttgttgtagtcgccgactgtcgtgtctgcgtttagatccctccattatcgcgattgcgtagatggagtactattttataccttgtaattaaatttttttattaattaaacgtataaaaacgttccgtatctgtatttaagagccagatttcgtctaatagaacaaatagctacagtaaaaataactagaataattgctacacccactagaaaccacggatcgtaatacggcaatcggttttcgataataggtggaacgtatattttatttaaggacttaacaattgtctgtaaaccacaatttgcttccgcggatcctgtattaactatctgtaaaagcatatgttgaccgggcggagccgaacattctccgatatctaatttctgtatatctataatattattaacctccgcatacgcattacagttcttttctagcttggataccgcactaggtacatcgtctagatctattcctatttcctcagcgatagctcttctatccttttccggaagcaatgaaatcacttcaataaatgattcaaccatgagtgtgaaactaagtcgagaattactcatgcatttgttagttattcggagcgcgcaatttttaaactgtcctataacctctcctatatgaatagcacaagtgacattagtagggatagaatgttgagctaatttttgtaaataactatctataaaaagattatacaaagttttaaactctttagtttccgccatttatccagtctgagaaaatgtctctcataataaatttttccaagaaactaattgggtgaagaatggaaacctttaatctatatttatcacagtctgttttggtacacatgatgaattcttccaatgccgtactaaattcgatatctttttcgatttctggatatgtttttaataaagtatgaacaaagaaatggaaatcgtaataccagttatgtttaactttgaaattgttttttattttcttgttaatgattccagccacttgggaaaagtcaaagtcgtttaatgccgatttaatacgttcattaaaaacaaactttttatcctttagatgaattattattggttcattggaatcaaaaagtaagatattatcgggtttaagatctgcgtgtaaaaagttgtcgcaacagggtagttcgtagattttaatgtataacagagccatctgtaaaaagataaactttatgtattgtaccaaagatttaaatcctaatttgatagctaactcggtatctactttatctgccgaatacagtgctaggggaaaaattataatgtttcctctttcgtattcgtagttagttctcttttcatgttcgaaaaagtgaaacatgcggttaaaatagtttataacattaatattactgttaataactgccggataaaagtgggatagtaatttcacgaatttgatactgtcctttctctcgttaaacgcctttaaaaaaactttagaagaatatctcaatgagagttcctgaccatccatagtttgtatcaataatagcaacatatgaagaacccgtttatacagagtatgtaaaaatgttaatttatagtttaatcccatggcccacgcacacacgattaattttttttcatctccctttagattgttgtatagaaatttgggtactgtgaactccgccgtagtttccatgggactatataattttgtggcctcgaatacaaattttactacatagttatctatcttaaagactataccatatcctcctgtagatatgtgataaaaatcgtcgtttataggataaaatcgtttatccttttgttggaaaaaggatgaattaatgtaatcattctcttctatctttagtagtgtttccttattaaaattcttaaaataatttaacaatctaactgacggagcccaattttggtgtaaatctaattgggacattatattgttaaaatacaaacagtctcctaatataacagtatctgataatctatggggagacatccattgatattcaggggatgaatcattggcaacacccatttattgtacaaaaagccccaatttacaaacgaaagtccaggtttgatagagacaaactattaactattttgtctctgtttttaacacctccacagtttttaatttctttagtaatgaaattattcacaatatcagtatcttctttatctaccagagattttactaacttgataaccttggctgtctcattcaatagggtagtaatatttgtatgtgtgatattgatatctttttgaattgtttcttttagaagtgattctttgatggtgccagcatacgaattacaataatgcagaaactcggttaacatgcaggaattatagtaagccaattccaattgttgcctgtgttgtattagagtgtcaatatgagcaatggtgtccttgcgtttctctgatagaatgcgagcagcgattttggcgttatcatttgacgatatttctggaatgacgaatcctgtttctactaactttttggtaggacaaagtgaaacaatcaagaagatagcttctcctcctatttgtggaagaaattgaactcctctagatgatctactgacgatagtatctccttgacagatattggaccgaattacagaagtacctggaatgtaaagccctgaaaccccctcattttttaagcagattgttgccgtaaatcctgcactatgcccaagatagagagctcctttggtgaatccatctctatgtttcagtttaaccaagaaacagtcagctggtctaaaatttccatctctatctaatacagcatctaacttgatgtcaggaactatgaccggtttaatgttatatgtaacattgagtaaatccttaagttcataatcatcactgtcatcagttatgtacgatccaaacaatgtttctaccggcatagtggatacgaagatgctatccatcagaatgtttccctgattagtattttctatatagctattcttctttaaacgattttccaaatcagtaactatgttcatttttttaggagtaggacgcctagccagtatggaagaggattttctagatcctctcttcaacatctttgatctcgatggaatgcaaaaccccatagtgaaacaaccaacgataaaaataatattgtttttcactttttataattttaccatctgactcatggattcattaatatctttataagagctactaacgtataattctttataactgaactgagatatatacaccggatctatggtttccataattgagtaaatgaatgctcggcaataactaatggcaaatgtatagaacaacgaaattatactagagttgttaaagttaatattttctatgagctgttccaataaattatttgttgtgactgcgttcaagtcataaatcatcttgatactatccagtaaaccgtttttaagttctggaatattattatcccattgtaaagcccctaattcgactatcgaatatcctgctctgatagcagtttcaatatcgacggacgtcaatactgtaataaaggtggtagtattgtcatcatcgtgataaactactggaatatggtcgttagtaggtacggtaactttacacaacgcgatatataactttccttttgtaccatttttaacgtagttgggacgtcctgcagggtattgttttgaagaaatgatatcgagaacagatttgatacgatatttgttggattcctgattattcactataatataatctagacagatagatgattcgataaatagagaaggtatatcgttggtaggataatacatccccattccagtattctcggatactctattgatgacactagttaagaacatgtcttctattctagaaaacgaaaacatcctacatggactcattaaaacttctaacgctcctgattgtgtctcgaatgcctcgtacaaggatttcaaggatgccatagattctttgaccaacgatttagaattgcgtttagcatctgatttttttattaaatcgaatggtcggctctctggtttgctaccccaatgataacaatagtcttgtaaagataaaccgcaagaaaatttatacgcatccatccaaataaccctagcaccatcggatgatattaatgtattattatagattttccatccacaattattgggccagtatactgttagcaacggtatatcgaatagattactcatgtaacctactagaatgatagttcgtgtactagtcataatatctttaatccaatctaaaaaatttaaaattagattttttacactgttaaagttaacaaaagtattacccgggtacgtggatatcatatatggcattggtccattatcagtaatagctccataaactgatacggcgatggtttttatatgtgtttgatctaacgaggaagaaattcgcgcccacaattcatctctagatatgtatttaatatcaaacggtaacacatcaatttcgggacgcgtatatgtttctaaatttttaatccaaatataatgatgacctatatgccctattatcatactgtcaactatagtacacctagggaacttacgatacatctgtttcctataatcgttaaattttacaaatctataacatgctaaaccttttgacgacagccattcattaatttctgatatggaatctgtattctcgataccgtatcgttctaaagccagtgctatatctccctgttcgtgggaacgctttcgtataatatcgatcaacggataatctgaagtttttggagaataatatgactcatgatctatttcgtccataaacaatctagacataggaattggaggcgatgatcttaattttgtgcaatgagtcgtcaatcctataacttctaatcttgtaatattcatcatcgacataatactatctatgttatcatcgtatattagtataccatgaccttcttcatttcgtgccaaaatgatatacagtcttaaatagttacgcaatatctcaatagtttcataattgttagctgttttcatcaaggtttgtatcctgtttaacatgatggcgttctataacgtctctattttctatttttaattttttaaatttttaacgatttactgtggctagatacccaatctctctcaaatatttttttagcctcgcttacaagctgtttatctatactattaaaactgacgaatccgtgattttggtaatgggttccgtcgaaatttgccgaagtgatatgaacatattcgtcgtcgactatcaacaattttgtattattctgaatagtgaaaaccttcacagatagatcattttgaacacacaacgcatctagacttttggcggttgccatagaatatacgtcgttcttatcccaattaccaactagaagtctgatcttaactcctctattaatggctgcttctataatggagttgtaaatgtcgggccaatagtagctattaccgtcgacacgtgtagtgggaactatggccaaatgttcaatatctatactagtcttagctgacctgagtttatcaataactacatcggtatctagatctctagaatatcccaataggtgttccggagaatcagtaaagaacactccacctataggattcttaatatgatacgcagtgctaactggcaaacaacaagccgcagagcataaattcaaccatgaattttttgcgctattaaaggctttaaaagtatcaaatcttctacgaagatctgtggccagcgggggataatcagaatatacacctaacgttttaatcgtatgtatagatcctccagtaaatgacgcgtttcctacataacatctttcatcatctgacacccaaaaacaaccgagtagtagtcccacattattttttttatctatattaacggttataaaatttatatccgggcagtgactttgtagctctcccagatttcttttccctcgttcatctagcaaaactattattttaatccctttttcagatgcctcttttagtttatcaaaaataagcgctcccctagtcgtactcagaggattacaacaaaaagatgctatgtatatatatttcttagctagagtgataatttcgttaaaacattcaaatgttgttaaatgatcggatctaaaatccatattttctggtagtgtttctaccagcctacattttgctcccgcaggtaccgatgcaaatggccacatttagttaacataaaaacttatacatcctgttctatcaacgattctagaatatcatcggctatatcgctaaaattttcatcaaagtcgacatcacaacctaactcagtcaatatattaagaagttccatgatgtcatcttcgtctatttctatatccgtatccattgtagattgttgaccgattatcgagtttaaatcattactaatactcaatccttcagaatacaatctgtgtttcattgtaaatttataggcggtgtatttaagttggtagattttcaattatgtattaatatagcaacagtagttcttgctcctccttgattctagcatcctcttcattattttcttctacgtacataaacatgtccaatacgttagacaacacaccgacgatggcggccgctacagacacgaatatgactaaaccgatgaccatttaaaaacccctctctagctttcacttaaactgtatcgatcattcttttagcacatgtataatataaaaacattattctatttcgaatttaggcttccaaaaatttttcatccgtaaaccgataataatatatatagacttgttaatagtcggaataaatagattaatgcttaaactatcatcatctccacgattagagatacaatatttacattctttttgctgtttcgaaactttatcaatacacgttaatacaaacccaggaaggagatattgaaactgaggctgttgaaaatgaaacggtgaatacaataattcagataatgtaaaatcatgattccgtattctgatgatattagaactgctaatggatgtcgatggtatgtatctaggagtatctattttaacaaagcatcgatttgctaatatacaattatccttttgattaattgttattttattcatattcttaaaaggtttcatatttatcaattcttctacattaaaaatttccatttttaatttatgtagccccgcaatactcctcattacgtttcattttttgtctataatatccattttgttcatctcggtacatagattatccaattgagaagcgcatttagtagttttgtacattttaagtttattgacgaatcgtcgaaaactagttatagttaacattttattatttgataccctgatattaatacccctgccgttactattatttataactgatgtaatccacgtaacattggaattaactatcgatagtaatgcatcgacgcttccaaaattgtctattataaactcaccgataatttttttattgcatgttttcatattcattaggattatcaaatctttaatcttattacgattgtatgcgttgatattacaagacgtcattctaaaagacggaggatctccatcaaatgccagacaatcacgtacaaagtacatggaaataggttttgttctattgcgcatcatagatttatatagaacacccgtagaaatactaatttgttttactctataaaatactaatgcatctatttcatcgttttgtataacgtctttccaagtgtcaaattccaaatttttttcattgatagtaccaaattcttctatctctttaactacttgcatagataggtaattacagtgatgcctacatgccgttttttgaaactgaatagatgcgtctagaagcgatgctacgctagtcacaatcaccactttcatatttagaatatatatatgtaaaaatatagtagaatttcattttgtttttttctatgctataaatgaattctcattttgcatctgctcatactccgttttatattaataccaaagaaggaagatatctggttctaaaagccgttaaagtatgcgatgttagaactgtagaatgcgaaggaagtaaagcttcctgcgtactcaaagtagataaaccctcatcgcccgcgtgtgagagaagaccttcgtccccgtccagatgcgagagaatgaataaccctggaaaacaagttccgtttatgaggacggacatgctacaaaatatgttcgcggctaatcgcgataatgtagcttctagacttttgtcctaaaatactattatatccttttcgatattaataaatccgtgtcgtccaggttttttatctctttcagtatgtgaatagataggtattttatctctattcatcatcgaatttaagagatccgataaacattgtttgtattctccagatgtcagcatctgatacaacaatatatgtgcacataaacctctggcacttatttcatgtaccttccccttatcactaaggagaatagtatttgagaaatatgtatacatgatattatcatgaattagatatacagaatttgtaacactctcgaaatcacacgatgtgtcggcgttaagatctaatatatcactcgataacacattttcatctagatacactagacattttttaaagctaaaatagtctttagtagtaacagtaactatgcgattattttcatcgatgatacatttcatcggcatattattacgcttaccatcaaagactataccatgtgtatatctaacgtattctagcatagttgccatacgcgcattaaacttttcaggatctttggatagatcttccaatctatctatttgagaaaacatttttatcatgttcaatagttgaaacgtcggatccactatatagatattatctataaagattttaggaactacgttcatggtatcctggcgaatattaaaactatcaatgatatgattatcgttttcatcttttatcaccatatagtttctaagatatgggattttacttaatataatattatttcccgtgataaattttattagaaaggccaaatctataagaaaagtcctagaattagtctgaagaatatctatatcgccgtatagtatatttggattaattagatatagagaatatgatccgtaacatatacaacttttattatggcgtctaagatattcttccatcaacttattaacatttttgactagggaagatacattatgacgtcccattacttttgccttgtctattactgcgacgttcatagaatttagcatatctcttgccaattcttccattgatgttacattataagaaattttagatgaaattacatttggagctttaatagtaagaactcctaatatgtccgtgtatgtggtcactaatacagattgtagttctataatcgtaaataatttacctatattatatgtttgagtctgtttagaaaagtagctaagtatacgatcttttatttctgatgcagatgtatcaacatcggaaaaaaatctttttttattcttttttactaaagatacaaatatgtctttgttaaaaacagttattttctgaatatttctagcttgtaattttaacatatgatattcgttcacactaggtactctgcctaaataggtttctataatctttaatgtaatattaggaaaagtattctgatcaggattcctattcattttgaggatttaaaactctgattattgtctaatatggtctctacgcaaactttttcacagagcgatagagtttttgataactcgtttttcttaagaaatataaaactactgtctccagagctcgctctatcttttattttatctaattcgatacaaactcctgatactggttcagaaagtaattcattaattttcagtcctttatagaagatatttaatatagataatacaaaatcttcagtttttgatatcgatctgattgatcctagaactagatatattaataacgtgctcattaggcagtttatggcagcttgataattagatatagtatattccagttcatatttattagataccgcattgcccagattttgatattctatgaattcctctgaaaataaatccaaaataactagacattctattttttgtggattagtgtactctcttccctctatcatgttcactactggtgtccacgatgataaatatctagagggaatataatatagtccataggatgccaatctagcaatgtcgaataactgtaattttattcttcgctcttcattatgaattgattcttgaggtataaacctaacacaaattatattattagacttttcgtatgtaatgtctttcatgttataagtttttaatcctggaatagaatctattttaatgaggcttttaaacgcagagttctccaacgagtcaaagcataatactctgttgtttttcttatatacgatgttacgattttcttctttgaatggaataggtttttgaattagtttataattacaacataatagataaggaagtgtgcaaatagtacgcggaaaaaacataatagctcccctgttttcatccatggttttaagtaaatgatcactggcttctttagtcaatggatattcgaacattaaccgtttcatcatcattggacagaatccatatttcttaatgtaaagagtgatcaaatcattgtgtttattgtaccatcttgttgtaaatgtgtattcggttatcggatctgctcctttttctattaaagtatcgatgtcaatctcgtctaagaattcaactatatcgacatatttcatttgtatacacataaccattactaacgtagaatgtataggaagagatgtaacgggaacagggtttgttgattcgcaaactattctaatacataattcttctgttaatacgtcttgcacgtaatctattatagatgccaagatatctatataattattttgtaagatgatgttaactatgtgatctatataagtagtgtaataattcatgtattttgatatatgttccaactctgtctttgtgatgtctagtttcgtaatatctatagcatcctcaaaaaatatattcgcatatattcccaagtcttcagttctatcttctaaaaaatcttcaacgtatggaatataataatctattttacctcttctgatatcattaatgatatagtttttgacactatcttctgtcaattgattcttattcactatatctaagaaacggatagcgtccctaggacgaactactgccattaatatctctattatagcttctggacataattcatctattataccagaattaatgggaactattccgtatctatctaacatagttttaagaaagtcagaatctaagacctgatgttcatatattggttcatacatgaaatgatctctattgatgatagtgactatttcattctctgaaaattggtaactcattctatatatgctttccttgttgatgaaggatagaatatactcaatagaatttgtaccaacaaactgttctcttatgaatcgtatatcatcatctgaaataatcatgtaaggcatacatttaacaattagagacttgtctcctgttatcaatatactattcttgtgataatttatgtgtgaggcaaatttgtccacgttctttaattttgttatagtagatatcaaatccaatggagctacagttcttggcttaaacagatatagtttttctggaacaaattctacaacattattataaaggactttgggtagataagtgggatgaaatcctattttaattaatgcgatagccttgtcctcgtgcagatatccaaacgcttttgtgatagtatggcattcattgtctagaaacgctctacgaatatctgtgacagatatcatctttagagaatatactagtcgcgttaatagtactacaatttgtattttttaatctatctcaataaaaaaattaatatgtatgattcaatgtataactaaactactaactgttattgataactagaatcagaatctaatgatgacgtacccaagaagtttatctactgccaatttagctgcattatttttagcatctcgtttagattttccatctgccttatcgaatactcttccgtcgatatctacacaggcataaaatgtaggagagttactaggcccaactgattcaatacgaaaagaccaatctctcttagttatttggcagtactcattaataacggtgacagggttagcatctttccaatcaataatttttttagccggaataacatcatcaaaagacttatgatcctctctcattgatttttcgcgggatacatcatctattatgacgtcagccataacatcagcatccggcttatccgcctccgttgtcataaaccaacgaggaggaatatcgtcggagctgtacaccatagcactacgttgaagatcgtacagagctttattaacttctcgcttctccatattaagttgtctagttagttgtgcagcagtagctccttcgattccaatggttttaatagcctcacacacaatctctgcgttagaacgttcgtcgatatagattttagacatttttagagagaactaacacaaccagcaataaaactgaacctactttatcatttttttattcatcatcctctggtggttcgtcgttcctatcaaatgtagctctgattaacccgtcatctataggtgatgctggttctggagattctggaggagatggattattatctggaagaatctctgttatttccttgttttcatgtatcgattgcgttgtaacattaagattgcgaaatgctctaaatttgggaggcttaaagtgttgtttgcaatctctacacgcgtgtctaactagtggaggttcgtcagctgctctagtttgaatcatcatcggcgtagtattcctacttttacagttaggacacggtgtattgtatttctcgtcgagaacgttaaaataatcgttgtaactcacatcctttattttatctatattgtattctactcctttcttaatgcattttataccgaataagagatagcgaaggaattctttttcggtgccgctagtacccttaatcatatcacatagtgttttatattccaaatttgtggcaatagacggtttatttctatacgatagtttgtttctggaatcctttgagtattctataccaatattattctttgattcgaatttagtttcttcgatattagattttgtattacctatattcttgatgtagtactttgatgatttttccatggcccattctattaagtcttccaagttggcatcatccacatattgtgatagtaattctcggatatcagtagcggctaccgccattgatgtttgttcattggatgagtaactactaatgtatacattttccatttataacacttatgtattaactttgttcatttatattttttcattattatgttgatattaacaaaagtgaatatatatatgttaataattgtattgtggttatacggctacaattttataatgagtgaaagtcagtgtccgatgatcaatgacgatagctttactctgaaaagaaagtatcaaatcgatagtgcggagtcaacaataaaaatggataagaagaggataaagtttcagaatagagccaaaatggtaaaagaaataaatcagacaataagagcagcacaaactcattacgagacattgaaactaggatacataaaatttaagagaatgattaggactactactctagaagatatagcaccatctattccaaataatcagaaaacttataaactattctcggacatttcagccatcggcaaagcatcacagaatccgagtaagatggtatatgctctgctgctttacatgtttcccaatttgtttggagatgatcatagattcattcgttatagaatgcatccaatgagtaaaatcaaacacaagatcttctctcctttcaaacttaatcttattagaatattagtggaagaaagattctataataatgaatgcagatctaataaatggaaaataattggaacacaagttgataaaatgttgatagctgaatctgataaatatacaatagatgcaaggtataacctaaaacccatgtatagaatcaagggagaatctgaagaagataccctcttcatcaaacagatggtagaacaatgtgtgacatcccaggaattggtggaaaaagtgttgaagatactgtttagagatttgttcaagagtggagaatacaaagcgtacagatacgatgatgatgtagaaaatggattcattggattggatacactaaaattaaacattgttcatgatatagttgaaccatgtatgcctgttcgtaggccagtggctaagatactgtgtaaagaaatggtaaataaatactttgagaatccgctacatattattggtaaaaatcttcaagagtgcattgactttgttagtgaataggcatttcatctttctccaatactaattcaaattgttaaattaataatggatagtataaatagttattagttataagatagtaaaaataattattagaataagagtgtagtatcatagataactctcttctataaaaatggattttattcgtagaaagtatcttatatacacagtagaaaataatatagattttttaaaggatgatacattaagtaaagtaaacaattttaccctcaatcatgtactagctctcaagtatctagttagcaattttcctcaacacgttattactaaggatgtattagctaataccaatttttttgttttcatacatatggtacgatgttgtaaagtgtacgaagcggttttacgacacgcatttgatgcacccacgttgtacgttaaagcattgactaagaattatttatcgtttagtaacacaatacaatcgtacaaggaaaccgtgcataaactaacacaagatgaaaaatttttagaggttgccgaatacatggacgaattaggagaacttataggcgtaaattatgacttagttcttaatccattatttcacggaggggaacccatcaaagatatggaaatcatttttttaaaactgtttaagaaaacagacttcaaagttgttaaaaaattaagtgttataagattacttatttgggcatacctaagcaagaaagatacaggcatagagtttgcggataatgatagacaagatatatatactctatttcaacaaactggtagaatcgtccatagcaatctaacagaaacgtttagagattatatctttcccggagataagactagctattgggtgtggttaaacgaaagtatagctaatgatgcggatattgttcttaatagacacgccattaccatgtatgataaaattcttagttatatatactctgagataaaacaaggacgcgttaataaaaacatgcttaagttagtttatatctttgagcctgaaaaagatatcagagaacttctgctagaaatcatatatgatattcctggagatatcctatctattattgatgcaaaaaacgacgattggaaaaaatattttattagtttttataaagctaattttattaacggtaatacatttattagtgatagaacgtttaacgaggacttattcagagttgttgttcaaatagatcccgaatatttcgataatgaacgaattatgtctttattctctacgagtgctgcggacattaaacgatttgatgagttagatattaataacagttatatatctaatataatttatgaggtgaacgatatcacattagatacaatggatgatatgaagaagtgtcaaatctttaacgaggatacgtcgtattatgttaaggaatacaatacatacctgtttttgcacgagtcggatcccatggtcatagagaacggaatactaaagaaactgtcatctataaaatccaagagtagacggctgaacttgtttagcaaaaacattttaaaatattatttagacggacaattggctcgtctaggtcttgtgttagatgattataaaggagacttgttagttaaaatgataaaccatcttaagtctgtggaggatgtatccgcattcgttcgattttctacagataaaaaccctagtattcttccatcgctaatcaaaactattttagctagttataatatttccatcatcgtcttatttcaaaggtttttgagagataatctatatcatgtagaagaattcttggataaaagcatccatctaaccaagacggataagaaatatatacttcaattgataagacacggtagatcatagaacagaccaaatatattattaataatttgtatatacatagatataattatcacacatttttgataaatgggaactgctgcaacaattcagactcccaccaaattaatgaataaagaaaatgcagaaatgattttggaaaaaattgttgatcatatagttatgtatattagtgacgaatcaagtgattcagaaaataatcctgaatatattgattttcgtaacagatacgaagactatagatctctcattataaaaagtgatcacgagtttgtaaagctatgtaaaaatcatgcggagaaaagttctccagaaacgcaacaaatgattatcaaacacatatacgaacaatatcttattccagtatctgaagtactattaaaacctataatgtccatgggtgacataattacatataacggatgtaaagacaatgaatggatgctagaacaactctctaccctaaactttaacaatctccgcacatggaactcatgtagcataggcaatgtaacgcgtctgttttatacattttttagttatctgatgaaagataaactaaatatataagtataatcccattctaatactttaacctgatgtattagcatcttattagaatattaacctaactaaaagacataacataaaaactcattacatagttgataaaaagcggtaggatataaatattatggctgccaccgttccgcgttttgacgacgtgtacaaaaatgcacaaagaagaattctagatcaagaaacattttttagtagaggtctaagtagaccgttaatgaaaaacacatatctatttgataattacgcgtatggatggataccagaaactgcaatttggagtagtagatacgcaaacttagatgcaagtgactattatcccatttcgttgggattacttaaaaagttcgagtttctcatgtctctatataaaggtcctattccagtatacgaagaaaaagtaaatactgaattcattgctaatggatctttctccggtagatacgtatcatatcttagaaagttttctgctcttccaacaaacgagtttattagttttttgttactgacttccattccaatctataatatcttgttctggtttaaaaatactcagtttgatattactaaacacacattattcagatacgtctatacagataatgccaaacacctggcgttggctaggtatatgtatcaaacaggagactataagcctttgtttagtcgtctcaaagagaattatatatttaccggtcccgttccaatatgtatcaaagatatagatcaccctaatcttagtagagcaagaagtccatccgattatgagacattagctaatattagtactatattgtactttaccaagtatgatccggtattaatgtttttattgttttacgtacctgggtattcaattactacaaaaattactccagccgtagaatatctaatggataaactgaatctaacaaagagcgacgtacaactgttgtaaattattttatgcttcgtaaaatgtaggttttgaaccaaacattctttcaaagaatgagatgcataaaactttattatccaatagattgactatttcggacgtcaatcgtttaaagtaaacttcgtaaaatattctttgatcactgccgagtttaaaacttctatcgataattgtttcatatgttttaatatttacaagttttttggtccatggtccattaggacaaatatatgcaaaataatatcgttctccaagttctatagtctctggattatttttattatattcagtaaccaaatacatattagggttatctgcggatttataatttgagtgatgcattcgactcaacataaataattctagaggagacgatctactatcaaattcggatcgtaaatctgtttctaaagaacggagaatatctatacatacctgattagaattcatccgtccttcagacaacatctcagacagtctggtcttgtatgtcttaatcatattcttatgaaacttggaaacatctcttctagtttcactagtacctttattaattctctcaggtacagattttgaattcgacgatgctgagtatttcatcgttgtatatttcttcttcgattgcataatcagattcttatataccgcctcaaactctattttaaaattattaaacaatactctattattaatcagtcgttctaactctttcgctatttctatagacttatctacatcttgactgtctatctctgtaaacacggagtcggtatctccatacacgctacgaaaacgaaatctgtaatctataggcaacgatgttttcacaatcggattaatatctctatcgtccatataaaatggattacttaatggattggcaaaccgtaacataccgttagataactctgctccatttagtaccgattctagatacaagatcattctacgtcctatggatgtgcaactcttagccgaagcgtatgagtatagagcactatttctaaatcccatcagaccatatactgagttggctactatcttgtacgtatattgcatggaatcatagatggccttttcagttgaactggtagcctgttttagcatctttttatatctggctctctctgccaaaaatgttcttaatagtctaggaatggttccttctatcgatctatcgaaaattgctatttcagagatgaggttcggtagtctaggttcacaatgaaccgtaatatatctaggaggtggatatttctgaagcaatagctgattatttatttcttcttccaatctattggtactaacaacgacaccgactaatgtttccggagatagatttccaaagatacacacattaggatacagactgttataatcaaagattaatacattattactaaacattttttgttttggagcaaataccttaccgccttcataaggaaacttttgttttgtttctgatctaactaagatagttttagtttccaacaatagctttaacagtggacccttgatgactgtactcgctctatattcgaataccatggattgaggaagcacatatgttgacgcacccgcgtctgtttttgtttctactccataatactcccacaaatactgacacaaacaagcatcatgaatacagtatctagccatatctaaagctatgtttagattataatccttatacatctgagctaaatcaacgtcatcctttccgaaagataatttatatgtatcattaggtaaagtaggacataatagtacgactttaaatccattttcccaaatatctttacgaattactttacatataatatcctcatcaacagtcacataattacctgtggttaaaacctttgcaaatgcagcggctttgcctttcgcgtctgtagtatcgtcaccgatgaacgtcatttctctaactcctctatttaatactttacccatgcaactgaacgcgttcttggatatagaatccaatttgtacgaatccaatttttcaaatttttgaatgaatgaatatagatcgaaaaatatagttccattattgttattaacgtgaaacgtagtattggccatgccgcctactcccttatgactagactgatttctctcataaatacagagatgtacagcttcctttttgtccggagatctaaagataatcttctctcctgttaataactctagacgattagtaatatatctcagatcaaagttatgtccgttaaaggtaacgacgtagtcgaacgttagttccaacaattgtttagctattcgtaacaaaactatttcagaacatagaactagttctcgttcgtaatccatttccattagtgactgtatcctcaaacatcctctatcgacggcttcttgtatttcctgttccgttaacatctcttcattaatgagcgtaaacaataatcgtttaccacttaaatcgatataacagtaacttgtatgcgagattgggttaataaatacagaaggaaacttcttatcgaagtgacactctatatctagaaataagtacgatcttgggatatcgaatctaggtatttttttagcgaaacagttacgtggatcgtcacaatgataacatccattgttaatctttgtcaaatattgctcgtccaacgagtaacatccgtctggagatatcccgttagaaatataaaaccaactaatattgagaaattcatccatggtggcattttgtatgctgcgtttctttggctcttctatcaaccacatatctgcgacggagcattttctatctttaatatctagattataacttattgtctcgtcaatgtctatagttctcatctttcccaacggcctcgcattaaatggaggaggagacaatgactgatatatttcgtccgtcactacgtaataaaagtaatgaggaaatcgtataaatacggtctcaccatttcgacatctggatttcagatataaaaatctgttttcaccgtgactttcaaaccaattaatgcaccgaacatccatttatagaatttagaaatatattttcatttaaatgaatcccaaacattggggaagagccgtatggaccattatttttatagtactttcgcaagcgggtttagacggcaacatagaagcgtgtaaacgaaaactatatactatagttagcactcttccatgtcctgcatgtagacggcacgcgactatcgctatagaggacaataatgtcatgtctagcgatgatctgaattatatttattattttttcatcagattatttaacaatttggcatctgatcccaaatacgcgatcgatgtgacaaaggttaaccctttataaacttaacccattataaaacttatgattagtcacaactgaaataaccgcgtgattattttttggtataattctacacggcatggtttctgtgactatgaattcaacccccgttacattagtgaaatctttaacaaacagcaagggttcgtcaaagacataaaactcattgtttacaatcgaaatagaccccctatcacacttaaaataaaaaatatccttatcctttaccaccaaataaaattctgattggtcaatgtgaatgtattcacttaacagttccacaaatttatttattaactccgaggcacatacatcgtcggtattttttatggcaaactttactcttccagcatccgtttctaaaaaaatattaacgagttccatttatatcatccaatattattgaaatgacgttgatggacagatgatacaaataagaaggtacggtacctttgtccaccatctcctccaattcatgctctattttgtcattaactttaatgtatgaaaacagtacgccacatgcttccatgacagtgtgtaacactttggatacaaaatgtttgacattagtataattgttcaagactgtcaatctataatagatagtagctataatatattctatgatggtattgaagaagatgacaaccttggcatattgatcatttaacacagacatggtatcaacagatagcttgaatgaaagagaatcagtaattggaataagcgtcttctcgatagagtgtccgtataccaacatgtctgatattttgatgtattccattaaattatttagttttttctttttattctcgttaaacagcatttctgtcaacggaccccaacatcgttgaccgattaagttttgattgatttttccgtgtaaggcgtatctagtcagatcgtatagcctatccaataatccatcatctgtgcgtagatcacatcgtacactttttaattctctatagaagagcgacagacatctggagcaattacagacagcaatttctttattctctacagatgtaagatacttgaagacattcctatgatgatgcagaattttggataacacggtattgatggtatctgttaccataattcctttgatggctgatagtgtcagagcacaagatttccaatctttgacaatttttagcaccattatctttgttttgatatctatatcagacagcatggtgcgtctgacaacacagggattaagacggaaagatgaaatgattctctcaacatcttcaatagataccttgctattttttctggcattatctatatgtgcgagaatatcctctagagaatcagtatcctttttgatgatagtggatctcaatgacatgggacgtttaaaccttcttattctatcaccagattgcatggtgatttgtcttctttcttttatcataatgtaatctctaaattcatcggcaaattgtctatatctaaaatcataatatgagatgtttacctctacaaatatctgttcgtccaatgttagagtatttacatcagttttgtattccaaattaaacatggcaacggatttaattttatattcctctattaagtcctcgtcgataataacagaatgtagataatcatttaatccatcgtacatggttggaagatgcttgttgacaaaatctttaattgtcttgatgaaggtgggactatatctaacatcttgattaataaaatttataacattgtccataggatactttgtaactagttttatacacatctcttcatcggtaagtttagacagaatatcgtgaacaggtggtatattatattcatcagatatacgaagaacaatgtccaaatctatattgtttaatatattatatagatgtagcgtagctcctacaggaatatctttaactaagtcaatgatttcatcaaccgttagatctattttaaagttaatcatataggcattgatttttaaaaggtatgtagccttgactacattctcattaattaaccattccaagtcactgtgtgtaagaagattatattctatcataagcttgactacatttggtcccgataccattaaagaattcttatgatataaggaaacagcttttaggtactcatctactctacaagaattttggagagccttaacgatatcagtgacgtttattatttcaggaggaaaaaacctaacattgagaatatcggaattaatagcttccagatacagtgattttggcaatagtccgtgtaatccataatccagtaacacgagctggtgcttgctagacaccttttcaatgtttaatttttttgaaataagctttgataaagccttcctcgcaaattccggatacatgaacatgtcggcgacatgattaagtattgttttttcattatttttatattttctcaacaagttctcaataccccaatagatgatagaatatcacccaatgcgtccatgttgtctatttccaacaggtcgctatatccaccaatagaagtttttccaaaaaagattctaggaacagttctaccaccagtaatttgttcaaaataatcccgcaattcattttcgggtttaaattctttaatatcgacaatttcatacgctcctcttttgaaactaaacttatttagaatatccagtgcatttctacaaaaaggacatgtatacttgacaaaaattgtcactttgttattggccaacctttgttgtacaaattcctcggccattttaatatttaagtgatataaaactatctcgacttatttaactctttagtcgagatatatggacgcagatagctatatgatagccaactacagaaggcaaacgctataaaaaacataattacgacgagcatatttataaatatttttattcagcattacttgatatagtaatattaggcacagtcaaacattcaaccactctcgatacattaactctctcattttctttaacaaattctgcaatatcttcgtaaaaagattcttgaaactttttagaatatctatcgactctagatgaaatagcgttcgtcaacatactatgttttgtatacataaaggcgcccattttaacagtttctagtgacaaaatgctagcgatcctaggatcctttagaatcacatagattgacgattcgtctctcttagtaactctagtaaaataatcatacaatctagtacgcgaaataatattatccttgacttgaggagatctaaacaatctagttttgagaacatcgataagttcatcgggaatgacatacatactatctttaatagaactcttttcatccagttgaatggattcgtccttaaccaactgattaatgagatcttctattttatcattttccagatgatatgtatgtccattaaagttaaattgtgtagcgcttctttttagtctagcagccaatactttaacatcactaatatcgatatacaaaggagatgatttatctatggtattaagaattcgtttttcgacatccgtcaaaaccaattcctttttgcctgtatcatccagttttccatcctttgtaaagaaattattttctactagactattaataagactgataaggattcctccataattgcacaatccaaactttttcacaaaactagactttacaagatctacaggaatgcgtacttcaggttttttagcttgtgattttttcttttgcggacattttcttgtgaccaactcatctaccatttcattgattttagcagtgaaataagctttcaatgcacgggcactgatactattgaaaacgagttgatcttcaaattccgccatttaagttcaccaaacaacttttaaatacaaatatatcaatagtagtagaataagaactataaaaaaaataataattaaccaataccaaccccaacaaccggtattattagttgatgtgactgttttctcatcacttagaacagatttaacaatttctataaagtctgtcaaatcatcttccggagaccccataaatacaccaaatatagcggcgtacaacttatccatttatacattgaatattggcttttctttatcgctatcttcatcatattcatcatcaatatcaacaagtcccagattacgagccagatcttcttctacattttcagtcattgatacacgttcactatctccagagagtccgataacgttagccaccacttctctatcaatgattagtttcttgagcgcgaaagtaatttttgtttccgttccggatctatagaagacgataggtgtgataattgccttggccaattgtctttctcttttactgagtgattctagttcaccttctatagatctgagaatggatgattctccagtcgaaacatattctaccatggatccgtttaatttgttgatgaagatggattcatccttaaatgttttctctgtaatagtttccaccgaaagactatgcaaagaatttggaatgcgttccttgtgcttaatgtttccatagacggcttctagaagttgatacaacataggactagccgcggtaacttttatttttagaaagtatccatcgcttctatcttgtttagatttatttttataaagtttagtctctccttccaacataataaaagtggaagtcatttgactagataaactatcagtaagttttatagagatagacgaacaattagcgtattgagaagcatttagtgtaacgtattcgatacattttgcattagatttactaatcgattttgcatactctataacacccgcacaagtctgtagagaatcgctagatgcagtaggtcttggtgaagtttcaactctcttcttgattaccttactcatgattaaacctaaataattgtactttgtaatataatgatatatattttcactttatctcatttgagaataaaaatgtttttgtttaaccactgcatgatgtacagatttcggaatcgcaaaccaccagtggttttattttatccttgtccaatgtgaattgaatgggagcggatgcgggtttcgtacgtagatagtacattcccgtttttagaccgagactccatccgtaaaaatgcatactcgttagtttggaataactcggatctgctatatggatattcatagattgactttgatcgatgaaggctcccctgtctgcagccatttttatgatcgtcttttgtggaatttcccaaatagttttataaactcgcttaatatcttctggaaggtttgtattctgaatggatccaccatctgccataatcctattcttgatctcatcattccataattttctctcggttaaaactctaaggagatgcggattaactacttgaaattctccagacaatactctccgagtgtaaatattactggtatacggttccaccgactcattatttcccaaaatttgagcagttgatgcagtcggcataggtgccaccaataaactatttctaagaccgtatgttctgattttatcttttagaggttcccaattccaaagatccgacggtacaacattccaaagatcatattgtagaataccgttactggcgtacgatcctacatatgtatcgtatggtccttccttctcagctagttcacaactcgcctctaatgcaccgtaataaatggtttcgaagatcttcttatttagatcttgtgcttccaggctatcaaatggataatttaagagaataaacgcgtccgctaatccttgaacaccaataccgataggtctatgtctcttattagagatttcagcttctggaataggataataattaatatctataattttattgagatttctgacaattactttgaccacatccttcagtttgagaaaatcaaatcgcccatctattacaaacatgttcaaggcaacagatgccagattacaaacggctacctcattagcatccgcatattgtattatctcagtgcaaagattactacacttgatagttcctaaattttgttgattactctttttgttacacgcatccttataaagaatgaatggagtaccagtttcaatctgagattctataatcgctttccagacgactcgagcctttattatagatttgtatctcctttctctttcgtatagtgtatacaatcgttcgaactcgtctccccaaacattgtccaatccaggacattcatccggacacatcaacgaccactctccgtcatccttcactcgtttcataaagagatcaggaatccaaagagctataaatagatctctggttctatgttcctcgtttcctgtattctttttaagatcgaggaacgccataatatcagaatgccacggttccaagtatatggccataactccaggccgtttgtttcctccctgatctatgtatctagcggtgttattataaactctcaacattggaataataccgtttgatataccattggtaccggagatatagcttccactggcacgaatattactaattgatagacctattccccctgccattttagagattaatgcgcatcgttttaacgtgtcatagataccctctatgctatcatcgatcatgttaagtagaaaacagctagacatttggtgacgactagttcccgcattaaataaggtaggagaagcgtgcgtaaaccatttttcagaaagtagattgtacgtctcaatagctgagtctatatcccattgatgaattcctactgcgacacgcattaacatgtgctgaggtctttcaacgatcttgttgtttattttcaacaagtaggatttttccaaagttttaaaaccaaaatagttgtatgaaaagtctcgttcgtaaataataaccgagttgagtttatccttatatttgttaactatatccatggtgatacttgaaataatcggagaatgtttcccatttttaggattaacatagttgaataaatcctccatcacttcactaaatagtttttttgtttccttgtgtagatttgatacggctattctggcggctagaatggcataatccggatgttgtgtagtacaagtggctgctatttcggctgccagagtgtccaattctaccgttgttactccattatatattccttgaataaccttcatagctattttaataggatctatatgatccgtgtttaagccataacataattttctaatacgagacgtgattttatcaaacatgacattttccttgtatccatttcgtttaatgacaaacatttttgttggtgtaataaaaaaattatttaacttttcattaatagggatttgacgtatgtagcgtacaaaatgatcgttcctggtatatagataaagagtcctatatatttgaaaatcgttacggctcgattaaactttaatgattgcatagtgaatatatcattaggatttaactccttgactatcatggcggcgccagaaattaccatcaaaagcattaatacagttatgccgatcgcagttaaaacggttatagcatccaccatttatatctaaaaattagatcaaagaatatgtgacaaagtcctagttgtatactgagaattgacgaaacaatgtttcttacatatttttttcttattagtaactgacttaatagtaggaactggaaagctagacttgattattctataagtatagatacccttccagataatgttctctttgataaaagttccagaaaatgtagaattttttaaaaagttatcttttgctattaccaagattgtgtttagacgcttattattaatatgagtgatgaaatccacaccgcctctagatatcgcctttatttccacattagatggtaaatccaatagtgaaactatctttttaggaatgtatggactcgcgtttagaggagtgaacgtcttgggcgtcggaaaggatgattcgtcaaacgaataaacaatttcacaaatggatgttaatgtattagtaggaaattttttgacgctagtggaattgaagattctaatggatgatgttctacctatttcatccgataacatgttaatttccgacaccaacggttttaatatttcgatgatatacggtagtctctctttcggacttatatagcttattccacaatacgagtcattatatactccaaaaaacaaaataactagtataaaatctgtatcgaatgggaaaaacgaaattatcgacataggtatagaatccggaacattgaacgtattaatacttaattctttttctgtggtaagtaccgataggttattgacattgtatggttttaaatattctataacttgagacttgatagatattagtgatgaattgaaaattatttttatcaccacgtgtgtttcaggatcatcgtcgacgcccgtcaaccaaccgaatggagtaaaataaatatcattaatatatgctctagatattagtatttttattaatcctttgattatcatcttctcgtaggcgaatgattccatgatcaagagtgatttgagaacatcctccggagtattaatgggcttagtaaacagtccatcgttgcaataataaaagttatccaagttaaaggatattatgcattcgtttaaagatatcacctcatctgacggagacaattttttggtaggttttagagactttgaagctacttgtttaacaaagttattcatcgtcgtctactattctatttaattttgtagttaatttatcacatatcacattaattgactttttggtccatttttccatacgtttatattcttttaatcctgcgttatccgtttccgttatatccagggatagatcttgcaagttaaatagaatgctcttaaataatgtcattttcttatccgctaaaaatttaaagaatgtataaacctttttcagagatttgaaactcttaggtggtgtcctagtacacaatatcataaacaaactaataaacattccacattcagattccaacagctgattaacttccacattaatacagcctattttcgctccaaatgtacattcgaaaaatctgaataaaacatcgatgtcacaatttgtattatccaatacagaatgtttgtgattcgtgttaaaaccatcggagaaggaatagaaataaaaattattatagtggtggaattcagttggaatattgcctccggagtcataaaaggatactaaacattgttttttatcataaattacacatttccaatgagacaaataacaaaatccaaacattacaaatctagaggtagaacttttaattttgtctttaagtatatacgataagatatgtttattcataaacgcgtcaaatttttcatgaatcgctaaggagtttaagaatctcatgtcaaattgtcctatataatccacttcggatccataagcaaactgagagactaagttcttaatacttcgattgctcatccaggctcctctctcaggctctattttcatcttgacgacctttggattttcaccagtatgtattcctttacgtgataaatcatcgattttcaaatccatttgtgagaagtctatcgccttagatactttttcccgtagtcgaggtttaaaaaaatacgctaacggtatactagtaggtaactcaaagacatcatatatagaatggtaacgcgtctttaactcgtcggttaactctttcttttgatcgagttcgtcgctactattgggtctgctcaggtgccccgactctactagttccaacatcataccgataggaatacaagacactttgccggcggttgtagatttatcatatttttccactacatatccgttacaatttgttaaaaatttagatacatctatattgctacataatccagctagtgaatatatatgacataataaattggtaaatcctagttctggtattttactaattactaaatctgtatatctttccatttatcatggaaaagaatttaccagatatcttcttttttccaaactgcgttaatgtattctcttacaaatattcacaagatgaattcagtaatatgagtaaaacggaacgtgatagtttctcattggccgtgtttccagttataaaacatagatggcataacgcacacgttgtaaaacataaaggaatatacaaagttagtacagaagcacgtggaaaaaaagtatctcctccatcactaggaaaacccgcacacataaacctaaccgcgaagcaatatatatacagtgaacacacaataagctttgaatgttatagttttctaaaatgtataacaaatacagaaatcaattcgttcgatgagtatatattaagaggactattagaagctggtaatagtttacagatattttccaattccgtaggtaaacgaacagatactataggtgtactagggaataagtatccatttagcaaaattccattggcctcattaactcctaaagcacaacgagagatattttcagcgtggatttctcatagacctgtagttttaactggaggaactggagtgggtaagacgtcacaggtacccaagttattgctttggtttaattatttatttggtggattctctactctagataaaatcactgactttcacgaaagaccagtcattctatctcttcctaggatagctttagttagattgcatagcaataccattttaaaatcattgggatttaaggtactagatggatctcctatttctttacggtacggatctataccggaagaattaataaacaaacaaccaaaaaaatatggaattgtattttctacccataagttatctctaacaaaactatttagttatggcactcttattatagacgaagttcatgagcatgatcaaataggagatattattatagcagtagcgagaaagcatcatacgaaaatagattctatgtttttaatgactgccacattagaggatgaccgagaacggctaaaagtatttttacctaatcccgcatttatacatattcctggagatacactgtttaaaattagcgaggtatttattcataataagataaatccatcttccagaatggcatacatagaagaagaaaagagaaatttagttactgctatacagatgtatactcctcctgatggatcatccggtatagtctttgtggcatccgttgcacagtgtcacgaatataaatcatatttagaaaaaagattaccgtatgatatgtatattattcatggtaaggtcttagatatagacgaaatattagaaaaagtgtattcatcacctaatgtatcgataattatttctactccttatttggaatccagcgttactatacgcaatgttacacacatttatgatatgggtagagtttttgtccccgctccttttggaggatcgcaacaatttatttctaaatctatgagagatcaacgaaaaggaagagtaggaagagttaatcctgggacatacgtctatttctatgatctgtcttatatgaagtctatacagcgaatagattcagaatttctacataattatatattgtacgctaataagtttaatctaacactccccgaagatttgtttataatccctacaaatttggatattctatggcgtacaaaggaatatatagactcgttcgatattagtacagaaacatggaataaattattatccaattattatatgaagatgatagagtatgctaaactttatgtactaagtcctattctcgctgaggagttggataactttgagaggacgggagaattaactagtattgtacgagaagccattttatctctaaatttacgaattaagattttaaattttaaacataaagatgatgatacgtatatacacttttgtaaaatattattcggtgtctataacggaacaaacgctactatatattatcatagacctctaacgggatatatgaatatgatttcagatactatatttgttcctgtagataataactaaaaatcaaactctaatgaccacatctttttttagagatgaaaaattttccacatctccttttgtagacacgactaaacattttgcagaaaaaagtttattagtgtttagataatcgtatacttcatcagtgtagatagtaaatgtgaacagataaaaggtattcttgctcaatagattggtaaattccatagaatatattaatcctttcttcttgagatcccacatcatttcaaccagagacgttttatccaatgatttacctcgtactataccacatacaaaactagattttgcagtgacgtcgtacctggtattcctaccaaacaaaattttacttttagttcttttagaaaattctaaggtagaatctctatttgccaatatgtcatctatggaattaccactagcaaaaaatgatagaaatatatattgatacatcgcagctggttttgatctactatactttaaaaacgaatcagattccataattgcctgtatatcatcagctgaaaaactatgttttacacgtattccttcggcatttctttttaatgatatatcttgtttagacaatgataaagttatcatgtccatgagagacgcgtctccgtatcgtataaatatttcattagatgttagacgcttcattaggggtatacttctataaggtttcttaatcagtccatcattggttgcgtcaagaactactatcggatgttgttgggtatctctagtgttacacatggccttactaaagtttgggtaaataactatgatatctctattaattatagatgcatatatttcattcgtcaaggatattagtatcgacttgctatcgtcattaatacgtgtaatgtaatcatataaatcatgcgatagccaaggaaaatttaaatagatgttcatcatataatcgtcgctataattcatattaatacgttgacattgactaatttgtaatatagcctcgccacgaagaaagctctcgtattcagtttcatcgataaaggataccgttaaatataactggttgccgatagtctcatagtctattaagtggtaagtttcgtacaaatacagaatccctaaaatattatctaatgttggattaatctttaccataactgtataaaatggagacggagtcataactattttaccgtttgtacttactggaatagatgaaggaataatctccggacatgctggtaaagacccaaatgtctgtttgaagaaatccaatgttccaggtcctaatctcttaacaaaaattacgatattcgatcccgatatcctttgcattctatttaccagcatatcacgaactatattaagattatctatcatgtctattctcccaccgttatataaatcgcctccgctaagaaacgttagtatatccatacaatggaatacttcatttctaaaatagtattcgttttctaattctttaatgtgaaatcgtatactagaaagggaaaaattatctttgagttttccgttagaaaagaaccacgaaactaatgttctgattgcgtccgattccgttgctgaattaatggatttacaccaaaaactcatataacttctagatgtagaagcattcgctaaaaaattagtagaatcaaaggatataagtagatgttccaacaagtgagcaattcccaagatttcatctatatcattctcgaatccgaaattagaaattcccaagtagatatcctttttcatccgatcgttgatgaaaatacgaactttattcggtaagacaatcatttactaaggagtaaaataggaagtaatgttcgtatgtcgttatcatcgtataaattaaaggtgtgttttttaccattaagtgacattataattttaccaatattggaattataatataggtgtatttgcgcactcgcgacggttgatgcatcggtaaatatagctgtatctaatgttctagtcggtatttcatcatttcgctgtctaataatagcgttttctctatctgtttccattacagctgcctgaagtttattggtcggataatatgtaaaataataagaaatacatacgaataacaaaaataaaataagatataataaagatgccatttagagatctaattttgttcaacttgtccaaattcctacttacagaagatgaggaatcgttggagatagtgtcttccttatgtagaggatttgaaatatcttatgatgacttgataacttactttccagataggaaataccataaatatatttataaagtatttgaacatgtagatttatcggaggaattaagtatggaattccatgatacaactctgagagatttagtctatcttagattgtacaagtattccaagtgtatacggccgtgttataaattaggagataatctaaaaggcatagttgttataaaggacaggaatatttatattagggaagcaaatgatgacttgatagaatatctcctcaaggaatacactcctcagatttatacatattctaatgagcgcgtccccataactggttcaaaattaattctttgtggattttctcaagttacatttatggcgtatacaacgtcgcatataacaacaaataaaaaggtagatgttctcgtttccaaaaaatgtatagatgaactagtcgatccaataaattatcaaatacttcaaaatttatttgataaaggaagcggaacaataaacaaaatactcaggaagatattttattcggtaacaggtggccaaactccataatttgctttttctatttcggattttagaatttccaaattcaccagcgatttatcggttttggtgaaatccaaggatttattaatgtccacaaatgccatttgttttgtctgtggattgtatttgaaaatggaaacgatgtagttagatagatgcgctgcaaagtttcctattagggttccgcgctttacgtcacccagcatacttgaatcaccatcctttaaaaaaaatgataagatatcaacatggagtatatcatactcggattttaattcttctactgcatcactgacattttcacaaatactacaatacggtttaccgaaaataatcagtacgttcttcatttatgggtatcaaaaacttaaaatcgttactgctggaaaataaatcactgacgatattagatgataatttatacaaagtatacaatggaatatttgtggatacaatgagtatttatatagccgtcgccaattgtgtcagaaacttagaagagttaactacggtattcataaaatacgtaaacggatgggtaaaaaagggagggcatgtaaccctttttatcgatagaggaagtataaaaattaaacaagacgttagagacaagagacgtaaatattctaaattaaccaaggacagaaaaatgttagaattagaaaagtgtacatccgaaatacaaaatgttaccggatttatggaagaagaaataaaggcagaaatgcaattaaaaatcgataaactcacatttcaaatatatttatctgattctgataacataaaaatatcattgaatgagatactaacacatttcaacaataatgagaatgttacattattttattgtgatgaacgagacgcagaattcgttatgtgtctcgaggctaaaacacatttctctaccacaggagaatggccgttgataataagtaccgatcaggatactatgctatttgcatctgctgataatcatcctaagatgataaaaaacttaactcaactgtttaaatttgttccctcggcagaggataactatttagcaaaattaacggcgttagtgaatggatgtgatttctttcctggactctatggggcatctataacacccaccaacttaaacaaaatacaattgtttagtgattttacaatcgataatatagtcactagtttggcaattaaaaattattatagaaagactaactctaccgtagacgtgcgtaatattgttacgtttataaacgattacgctaatttagacgatgtctactcgtatattcctccttgtcaatgcactgttcaagaatttatattttccgcattagatgaaaaatggaatgaatttaaatcatcttatttagagaccgttccgttaccctgtcaattaatgtacgcgttagaaccacgtaaggagattgatgtttcagaagttaaaactttatcatcttatatagatttcgaaaatactaaatcagatatcgatgttataaaatctatatcctcgatcttcggatattctaacgaaaactgtaacacgatagtattcggcatctataaggataatttactactgagtataaataattcattttactttaacgatagtctgttaataaccaatactaaaagtgataatataataaatataggttactagattaaaaatggtgttccaactcgtgtgctctacgtgcggcaaagatatttctcacgaacgatataaattgattatacgaaaaaaatcattaaaggatgtactcgtcagtgtaaagaacgaatgttgtaggttaaaattatctacacaaatagaacctcaacgtaacttaacagtgcaacctctattggatataaactaatatggatccggttaattttattaagacatatgcgcctagaggttctattatttttattaattataccatgtcattaacaagtcatttgaatccatcgatagaaaaacatgtgggtatttattatggtacgttattatcggaacacttggtagttgaatctacctatagaaaaggagttcgaatagtcccattggatagtttttttgaaggatatcttagtgcaaaagtatacatgttagagaatattcaagttatgaaaatagcagctgatacgtcattaactttattgggtattccgtatggatttggtcataatagaatgtattgttttaaattggtagctgaatgttataaaaatgccggtgttgaaacatcgtctaaacgaatattgggtaaaaatatttttctgagccaaaacttcacagacgataatagatggataaagatatatgattctaataatttaacattttggcaaattgattaccttaaagggtgagttaatatgcataactactcctccgttgttttttccctcgttctttttcttaacgttgtttgccatcactctcataatgtaaagatattctaaaatggtaaacttttgcatatcggacgcagaaattggtataaatgttgtaattgtattatttcccgtcaatggactagtcacagctccatcagttttatatcctttagagtatttctcactcgtgtctaacattctagagcattccatgatctgtttatcgttgatattggccggaaagatagattttttattttttattatattactattggcaattgtagatataacttctggtaaatatttttctaccttttcaatctcttctattttcaagccggctatatattctgctatattgttgctagtatcaataccttttcttgctaagaagtcatatgtggtattcactatatcagttttaactggtagttccattagcctttccacttctgcagaataatcagaaattggttctttaccagaaaatccagctactataataggctcaccgatgatcattggcaaaatcctatattgtaccagattaatgagagcatatttcatttccaataattctgctagttcttgagacattgatttatttgatgaatctagttggttctctagatactctaccatttctgccgcatacaataacttgttagataaaatcagggttatcaaagtgtttagcgtggctagaatagtgggcttgcatgtattaaagaatgcggtagtatgagtaaaccgttttaacgaattatatagtctccagaaatctgtggcgttacatacatgagccgaatgacatcgaagattgtccaatatttttaatagctgctctttgtccattatttctatatttgactcgcaacaattgtagataccattaatcaccgattcctttttcgatgctggacaatagcacaattgtttagctttggactctatgtattcagaattaatagatatatctctcaatacagattgcactatacattttgaaactatgtcaaaaattgtagaacgacgctgttctgcagccatttaactttaaataatttacaaaaatttaaaatgagcatccgtataaaaatcgataaactgcgccaaattgtggcatatttttcagagttcagtgaagaagtgtctataaatgtagactcgacggatgagttaatgtatatttttgccgccttgggcggatctgtaaacatttgggcaattatacctctaagtgcatcagtgttttaccgaggagccgaaaatattgtgtttaatcttcctgtgtccaaggtaaaatcgtgtttgtgtagttttcacaatgatgccatcatagatatagaacctgatctggaaaataatctagtaaaactttctagttatcatgtagtaagtgtcgattgtaacaaggaactgatgcctattaggacagatactactatttgtctaagtatagatcaaaagaaatcttacgtgtttaattttcacaagtatgaagaaaaatgttgtggtagaaccgtcattcatctagaatggttgttgggctttatcaagtgtattagtcagcatcagcatctggctattatgtttaaagatgacaatattattatgaagactcctggtaatactgatgcgttttccagggaatattctatgactgaatgttctcaagaactacaaaagttttctttcaaaatagctatctcgtctctcaacaaactacgaggattcaaaaagagagtcaatgtttttgaaactagaatcgtaatggataatgacgataacattttaggaatgttgttttcggatagagttcaatcctttaagatcaacatctttatggcgtttttagattaatactttcaatgagataaatatgggtggcggagtaagtgttgagctccctaaacgggatccgcctccgggagtacccactgatgagatgttattaaacgtggataaaatgcatgacgtgatagctcccgctaagcttttagaatatgtgcatataggaccactagcaaaagataaagaggataaagtaaagaaaagatatccagagtttagattagtcaacacaggacccggtggtctttcggcattgttaagacaatcgtataatggaaccgcacccaattgctgtcgcacttttaatcgtactcattattggaagaaggatggaaagatatcagataagtatgaagagggtgcagtattagaatcgtgttggccagacgttcacgacactggaaaatgcgatgttgatttattcgactggtgtcagggggatacgttcgatagaaacatatgccatcagtggatcggttcagcctttaataggagtaatagaactgtagagggtcaacaatcgttaataaatctgtataataagatgcaaacattatgtagtaaagatgctagtgtaccaatatgcgaatcatttttgcattatttacgcgcacacaatacagaagatagcaaagagatgatcgattatattctaagacaacagtctgcggactttaaacagaaatatatgagatgtagttatcccactagagataagttagaagagtcattaaaatatgcggaacctcgagaatgttgggatccagagtgttcgaatgccaatgttaatttcttactaacacgtaattataataatttaggactttgcaatattgtacgatgtaataccagcgtgaacaacttacagatggataaaacttcctcattaagattgtcatgtggattaagcaatagtgatagattttctactgttcccgtcaatagagcaaaagtagttcaacataatattaaacactcgttcgacctaaaattgcatttgatcagtttattatctctcttggtaatatggatactaattgtagctatttaaatgggtgccgcggcaagcatacagacgacggtgaatacactcagcgaacgtatctcgtctaaattagaacaagaagcgaacgctagtgctcaaacaaaatgtgatatagaaatcggaaatttttatatccgacaaaaccatggatgtaacctcactgttaaaaatatgtgctctgcggacgcggatgctcagttggatgctgtgttatcagccgctacagaaacatatagtggattaacaccggaacaaaaagcatacgtgccagctatgtttactgctgcgttaaacattcagacgagtgtaaacactgttgttagagattttgaaaattatgtgaaacagacttgtaattctagcgcggtcgtcgataacaaattaaagatacaaaacgtaatcatagatgaatgttacggagccccaggatctccaacaaatttggaatttattaatacaggatctagcaaaggaaattgtgccattaaagcgttgatgcaattgacgactaaggccactactcaaatagcacctagacaagttgctggtacaggagttcagttttatatgattgttatcggtgttataatattggcagcgttgtttatgtactatgccaagcgtatgttgttcacatccaccaatgataaaatcaaacttattttagccaataaggaaaacgtccattggactacttacatggacacattctttagaacttctccgatggttattgctaccacggatatgcaaaactgaaaatatattgataatattttaatagattaacatggaagttatcgctgatcgtctagacgatatagtgaaacaaaatatagcggatgaaaaatttgtagattttgttatacacggtctagagcatcaatgtcctgctatacttcgaccattaattaggttgtttattgatatactattatttgttatagtaatttatatttttacggtacgtctagtaagtagaaattatcaaatgttgttggtggtgctagtcatcacattaactattttttattactttatactataatagtactagactgacttctaacaaacatctcacctgccataaataaatgcttgatattaaagtcttctatttctaacactattccatctgtggaaaataatactctgacattatcgctaattgacacatcggtgagtgatatgcctataaagtaataatcttctttgggcacatataccagtgtaccaggttctaacaacctatttactggtgctcctgtagcatactttttctttaccttgagaatatccatcgtttgcttggtcaatagcgatatgtgattttttatcaaccactcaaaaaagtaattggagtgttcatatcctctacgggctattgtctcatggccgtgtatgaaatttaagtaacacgactgtggtagatttgttctatagagccgattgccgcaaatagatagaactaccaatatgtctgtacaaatgttaaacattaattgattaacagaaaaaacaatgttcgttctgggaatagaaaccagatcaaaacaaaattcgttagaatatatgccacgtttatacatggaatataaaataactacagtttgaaaaataacagtatcatttaaacatttaacttgcggggttaatctcacaactttactgtttttgaactgttcaaaatatagcatcgatccgtgagaaatacgtttagccgcctttaatagaggaaatcccaccgcctttctggatctcaccaacgacgatagttctgaccagcaactcatttcttcatcatccacctgttttaacatataataggcaggagatagatatccgtcattgcaatattccttctcgtaggcacacaatctaatattgataaaatctccattctcttctctgcatttattatcttgtctcggtggctgattaggctgtggtcttggtttaggccttggtctatcgttgttgaatctattttggtcattaaatctttcatttcttcctggtatatttctatcacctcgtttggttggatttttgtctatattatcgtttgtaacatcggtacgggtattcatttatcacaaaaaaaacttctctaaatgagtctactgctagaaaacctcatcgaagaagataccatattttttgcaggaagtatatctgagtatgatgatttacaaatggttattgccggcgcaaaatccaaatttccaagatctatgctttctatttttaatatagtacctagaacgatgtcaaaatatgagttggagttgattcataacgaaaatatcacaggagcaatgtttaccacaatgtataatataagaaacaatttgggtctaggagatgataaactaactattgaagccattgaaaactatttcttggatcctaacaatgaagttatgcctcttattattaataatacggatatgactgccgtcattcctaaaaaaagtggtaggagaaagaataagaacatggttatcttccgtcaaggatcatcacctatcttgtgcattttcgaaactcgtaaaaagattaatatttataaagaaaatatggaatccgcgtcgactgagtatacacctatcggagacaacaaggctttgatatctaaatatgcgggaattaatgtcctgaatgtgtattctccttccacatccataagattgaatgccatttacggattcaccaataaaaataaactagagaaacttagtactaataaggaactagaatcgtatagttctagccctcttcaagaacccattaggttaaatgattttctgggactattggaatgtgttaaaaagaatattcctctaacagatattccgacaaaggattgattactataaatggagaatgttcctaatgtatactttaatcctgtgtttatagagcccacgtttaaacattctttattaagtgtttataaacacagattaatagttttatttgaagtattcgttgtattcattctaatatatgtattttttagatctgaattaaatatgttcttcatgcctaaacgaaaaatacccgatcctattgatagattacgacgtgctaatctagcgtgtgaagacgataaattaatgatctatggattaccatggatgacaactcaaacatctgcgttatcaataaatagtaaaccgatagtgtataaagattgtgcaaagcttttgcgatcaataaatggatcacaaccagtatctcttaacgatgttcttcgcagatgatgattcattttttaagtatttggctagtcaagatgatgaatcttcattatctgatatattgcaaatcactcaatatctagactttctgttattattattgatccaatcaaaaaataaattagaagccgtgggtcattgttatgaatctctttcagaggaatacagacaattgacaaaattcacagactttcaagattttaaaaaactgtttaacaaggtccctattgttacagatggaagggtcaaacttaataaaggatatttgttcgactttgtgattagtttgatgcgattcaaaaaagaatcctctctagctaccaccgcaatagatcctgttagatacatagatcctcgtcgcgatatcgcattttctaacgtgatggatatattaaagtcgaataaagtgaacaataattaattctttattgtcatcatgaacggcggacatattcagttgataatcggccccatgttttcaggtaaaagtacagaattaattagacgagttagacgttatcaaatagctcaatataaatgcgtgactataaaatattctaacgataatagatacggaacgggactatggacgcatgataagaataattttgaagcattggaagcaactaaactatgtgatgtcttggaatcaattacagatttctccgtgataggtatcgatgaaggacagttctttccagacattgtttaattctgtgagcgtatggcaaacgaaggaaaaatagttatagtagccgcactcgatgggacatttcaacgtaaaccgtttaataatattttgaatcttattccattatctgaaatggtggtaaaactaactgctgtgtgtatgaaatgctttaaggaggcttccttttctaaacgattgggtgaggaaaccgagatagagataataggaggtaatgatatgtatcaatcggtgtgtagaaagtgttacgtcggctcataatattatattttttatctaaaaaactaaaaataaacattgattaaattttaatataatacttaaaaatggatgttgtgtcgttagataaaccgtttatgtattttgaggaaattgataatgagttagattacgaaccagaaagtgcaaatgaggtcgcaaaaaaactgccgtatcaaggacagttaaaactattactaggagaattattttttcttagtaagttacagcgacacggtatattagatggtgccaccgtagtgtatataggatcggctcctggtacacatatacgttatttgagagatcatttctataatttaggagtgatcatcaaatggatgctaattgacggccgccatcatgatcctattttaaatggattgcgtgatgtaactctagtgactcggttcgttgatgaggaatatctacgatccatcaaaaaacaactgcatccttctaagattattttaatttctgatgtaagatccaaacgaggaggaaatgaacctagtacggcggatttactaagtaattacgctctacaaaatgtcatgattagtattttaaaccccgtggcatctagtcttaaatggagatgcccgtttccagatcaatggatcaaggacttttatatcccacacggtaataaaatgttacaaccttttgctccttcatattcagctgaaatgagattattaagtatttataccggtgagaacatgagactgactcgagttaccaaattagacgctgtaaattatgaaaaaaagatgtactaccttaataagatcgtccgtaacaaagtagttgttaactttgattatcctaatcaggaatatgactattttcacatgtactttatgctgaggaccgtgtactgcaataaaacatttcctactactaaagcaaaggtactatttctacaacaatctatatttcgtttcttaaatattccaacaacatcaactgaaaaagttagtcatgaaccaatacaacgtaaaatatctagcaaaaattctatgtctaaaaacagaaatagcaagagatccgtacgcagtaataaatagaaacgtactactgagatatactaccgatatagagtataatgatttagttactttaataaccgttagacataaaattgattctatgaaaactgtgtttcaggtatttaacgaatcatccataaattatactccggttgatgatgattatggagaaccaatcattataacatcgtatcttcaaaaaggtcataacaagtttcctgtaaattttctatacatagatgtggtaatatctgacttatttcctagctttgttagactagatactacagaaactaatatagttaatagtgtactacaaacaggcgatggtaaaaagactcttcgtcttcccaaaatgttagagacggaaatagttgtcaagattctctatcgccctaatataccattaaaaattgttagatttttccgcaataacatggtaactggagtagagatagccgatagatctgttatttcagtcgctgattaatcaattagtagagatgagataagaacattataataatcaataatatatcttatatcttatatcttatatcttatatcttgtttagaaaaatgctaatattaaaatagctaacgctagtaatccaatcggaagccatttgatatctataatagggtatctaatttcctgatttaaatagcggacagctatattctcggtagctactcgtttggaatcacaaacattatttacatctaatttactatctgtaatggaaacgtttcccaatgaaatggtacaatccgatacattgcattttgttatatttttttttaaagaggctggtaacaacgcatcgcttcgtttacatggctcgtaccaacaataatagggtaatcttgtatctattcctatccgtactatgcttttatcaggataaatacatttacatcgtatatcgtctttgttagcatcacagaatgcataaatttgttcgtccgtcatgataaaaatttaaagtgtaaatataactattatttttatagttgtaataaaaagggaaatttgattgtatactttcggttctttaaaagaaactgacttgataaaaatggctgtaatctctaaggttacgtatagtctatatgatcaaaaagagattaatgctacagatattatcattagtcatgttaaaaatgacgacgatatcggtaccgttaaagatggtagactaggtgctatggatggggcattatgtaagacttgtgggaaaacggaattggaatgtttcggtcactggggtaaagtaagtatttataaaactcatatagttaagcctgaatttatttcagaaattattcgtttactgaatcatatatgtattcactgcggattattgcgttcacgagaaccgtattccgacgatattaacctaaaagagttatcgggacacgctcttaggagattaaaggataaaatattatccaagaaaaagtcatgttggaacagtgaatgtatgcaaccgtatcaaaaaattactttttcaaagaaaaaggtttgtttcgtcaacaagttggatgatattaacgttcctaattctctcatctatcaaaagttaatttctattcatgaaaagttttggccattattagaaattcatcaatatccagctaacttattttatacagactactttcccatccctccgttgattattagaccggctattagtttttggatagatagtatacccaaagagaccaatgaattaacttacttattaggtatgatcgttaagaattgtaacttgaatgctgatgaacaggttatccagaaggcggtaatagaatacgatgatattaaaattatttctaataacactaccagtatcaatttatcatatattacatccggcaaaaataatatgattagaagttatatcgtcgcccgacgaaaagatcagaccgctagatctgtaattggtcccagtacatctatcaccgttaatgaggtaggaatgcccgcatatattagaaatacacttacagaaaagatatttgttaatgcctttacagtggataaagttaaacaactattagcgtcaaaccaagttaaattttactttaataaacgattaaaccaattaacaagaatacgccaaggaaagtttattaaaaataaaatacatttattgcctggtgattgggtagaagtagctgttcaagaatatacaagtattatttttggaagacagccgtctctacatagatacaacgtcatcgcttcatctatcagagctaccgaaggagatactatcaaaatatctcccggaattgccaactctcaaaatgctgatttcgacggggatgaggaatggatgatattagaacaaaatcctaaagctgtaattgaacaaagtattcttatgtatccgacgacgttactcaaacacgatattcatggagcccccgtttatggatctattcaagatgaaatcgtagcagcgtattcattgtttaggatacaagatctttgtttagatgaagtattgaacatcttggggaaatatggaagagagttcgatcctaaaggtaaatgtaaattcagcggtaaagatatctatacttacttgataggtgaaaagattaattatccgggtctcttaaaggatggtgaaattattgcaaacgacgtagatagtaattttgttgtggctatgaggcatctgtcattggctggactcttatccgatcataagtcgaacgtggaaggtatcaactttattatcaagtcatcttatgtttttaagagatatctatctatttacggttttggggtgacattcaaagatctgagaccaaattcgacgttcactaataaattggaggccatcaacgtagaaaaaatagaacttatcaaagaagcatacgccaaatatctcaacgatgtaagagacgggaaaatagttccattatctaaagctttagaggcggactatgtggaatccatgttatccaacttgacaaatcttaatatccgagagatagaagaacatatgagacaaacgctgatagatgatccagataataacctcctgaaaatggccaaagcgggttataaagtaaatcccacagaactaatgtatattctaggtacgtatggacaacaaaggattgatggtgaaccagcagagactcgagtattgggtagagttttaccttactatcttccagactctaaggatccagaaggaagaggttatattcttaattctttaacaaaaggattaacgggttctcaatattacttttcgatgctggttgccagatctcaatctactgatatcgtctgtgaaacatcacgtaccggaacactggctagaaaaatcattaaaaagatggaggatatggtggtcgacggatacggacaagtagttataggtaatacgctcatcaagtacgccgccaattataccaaaattctaggctcagtatgtaaacctgtagatcttatctatccagatgagtccatgacttggtatttggaaattagtgctctgtggaataaaataaaacagggattcgtttactctcagaaacagaaacttgcaaagaagacattggcgccgtttaatttcctagtattcgtcaaacccaccactgaggataatgctattaaggttaaggatctgtacgatatgattcataacgtcattgatgatgtgagagagaaatacttctttacggtatctaatatagattttatggagtatatattcttgacgcatcttaatccttctagaattagaattacaaaagaaacggctatcactatctttgaaaagttctatgaaaaactcaattatactctaggtggtggaactcctattggaattatttctgcacaggtattgtctgagaagtttacacaacaagccctgtccagttttcacactactgaaaaaagtggtgccgtcaaacaaaaacttggtttcaacgagtttaataacttgactaatttgagtaagaataagaccgaaattatcactctggtatccgatgatatctctaaacttcaatctgttaagattaatttcgaatttgtatgtttgggagaattaaatccagacatcactcttcgaaaagaaacagataggtatgtagtagatataatagtcaatagattatacatcaagagagcagaaataaccgaattagtcgtcgaatatatgattgaacgatttatctcctttagcgtcattgtaaaggaatggggtatggaaacattcattgaggatgaggataatattagatttactgtctacctaaatttcgttgaaccggaagaattgaatcttagtaagtttatgatggttcttccgggtgccgccaacaagggaaagattagtaaattcaagattcctatctctgactatacgggttatgacgacttcaatcaaacaaaaaagctcaataagatgactgtagaactcatgaatctaaaagaattgggttctttcgatttggaaaacgtcaacgtgtatcctggagtatggaatacatacgatatcttcggtatcgaggccgctcgtgaatacttgtgcgaagccatgttaaacacctatggagaagggttcgattatctgtatcagccttgtgatcttctcgctagtttactatgtgctagttacgaaccagaatcagtgaataaattcaagttcggcgcagctagtactcttaagagagctacgttcggagacaataaagcattgttaaacgcggctcttcataaaaagtcagaacctattaacgataatagtagctgccacttttttagcaaggtccctaatataggaactggatattacaaatactttatcgacttgggtcttctcatgagaatggaaaggaaactatctgataagatatcttctcaaaagatcaaggaaatggaagaaacagaagacttttaattcttatcaataacatatttttctatgatctgtcttttaaacgatggattttccacaaatgcgcctctcaagtccctcatagaatgatacacgtataaaaaatatagcataggcgatgactccttatttttagacattagatatgccaaaatcatagccccgcttctatttactcccgcagcacaatgaaccaacacgggctcgtttcgttgatcacatttagataaaaaggcggttacgtcgtcaaaatatttactaatatcggtagttgtatcatctaccaacggtatatgaataatattaatattagagttaggtaatgtatatttatccatcgtcaaatttaaaacatatttgaacttaacttcagatgatggtgcatccatagcatttttataatttcccaaatacacattattggttacccttgtcattatagtgggagatttggctttgtgcatatctccagttgaacgtagtagtaagtatttatacaaacttttcttatccatttataacgtacaaatggataaaactactttatcggtaaacgcgtgtaatttagaatacgttagagaaaaggctatagtaggcgtacaagcagccaaaacatcaacacttatattctttgttattatattggcaattagtgcgctattactctggtttcagacgtctgataatccagtctttaatgaattaacgagatatatgcgaattaaaaatacggttaacgattggaaatcattaacggatagcaaaacaaaattagaaagtgatagaggtagacttctagccgctggtaaggatgatatattcgacttcaaatgtgtggatttcggcgcctattttatagctatgcgattggataagaaaacatatctgccgcaagctattaggcgaggtactggagacgcgtggatggttaaaaaggcggcaaaggtcgatccatctgctcaacaattttgtcagtatttgataaaacacaagtctaataatgttattacttgtggtaatgagatgttaaatgaattaggttatagcggttattttatgtcaccgcattggtgttccgattttagtaatatggaatagtgttagataaatgcggtaacgaatgttcctgtaaggaaccataacagcttagatttaacgttaaagatgagcataaacataataaacaaaattacaatcaaacttataacattaatatcaaacaatccaaaaaatgaaatcagtggagtagtaaacgcgtacataactcctggataacgtttagcagctgccgttcctattctagaccaaaaatttggtttcatgttttcgaaacggtattctgcaacaagtcggggatcgtgttctacatatttggcggcattatccagtatctgcctattgatcttcatttcgttttcgattctggctatttcaaaataaaatcccgatgatagacctccagactttataatttcatctacgatgttcagcgccgtagtaactctaataatataggctgataagctaacatcataccctcctgtatatgtgaatatggcatgatttttgtccattacaagctcggttttaactttattgcctgtaataatttctctcatctgtaggatatctatttttttgtcatgcattgccttcaagacgggacgaagaaacgtaatatcctcaataacgttatcgttttctacaataactacatattctacctttttattttctaactcggtaaaaaaattagaatcccatagggctaaatgtctagcgatatttcttttcgtttcttctgtacacatagtgttacaaaaccctgaaaagaagtgagtatacttgtcatcatttctaatgtttcctccagtccactgtataaacgcataatccttgtaatgatctggatcatccttgactaccacaacatttcttttttctggcataacttcgttgtcctttacatcatcgaacttctgatcattaatatgctcatgaacattaggaaatgtttctgatggaggtctatcaataactggcacaacaataacaggagttttcaccgccgccatttagttattgaaattaatcatatacaactctttaatacgagttatattttcgtctatccattgtttcacattgacatatttcgacaaaaagatataaaatgcgtattccaatgcttctctgtttaatgaattactaaaatatacaaacacgtcactgtctggcaataaatgatatcttagaatattgtaacaatttattttgtattgcacatgttcgtgatctatgagttcttcttcgaatggcataggatctccgaatctgaaaacgtataaataggagttagaataataatatttgagagtattggtaatatataaactctttagcggtataattagtttttttctctcaatttctatttttagatgtgatggaaaaatgactaattttgtagcattagtatcatgaactctaatcaaaatcttaatatcttcgtcacacgttagctctttgaagtttttaagagatgcatcagttggttctacagatggagtaggtgcaacaattttttgttctacacatgtatgtactggagccattgttttaactataatggtgcttgtatcgaaaaactttaatgcagatagcggaagctcttcgccgcgactttctacgtcgtaattgggttctaacgccgatctctgaatggatactagttttctaagttctaatgtgattctctgaaaatgtaaatccaattcctccggcattatagatgtgtatacatcggtaaataaaactatagtatccaacgatcccttctcgcaaattctagtcttaaccaaaaaatcgtatataaccacggagatggcgtatttaagagtggattcttctaccgttttgttcttggatgtcatataggaaactataaagtccgcactactgttaagaatgattactaacgcaactatatagtttaaattaagcattttggaaacataaaataactctgtagacgatacttgactttcgaataagtttgcagacaaacgaagaaagaacagacctctcttaatttcagaagaaaactttttttcgtattcctgacgtctagagtttatatcaataagaaagttaagaattagtcggttaatgttgtatttcattacccaagtttgagatttcataatattatcaaaagacatgataatattaaagataaagcgctgactatgaacgaaatagctatatggttcgctcaagaatatagtcttgttaaacgtggaaacgataactgtatttttaatcacgtcagcggcatctaaattaaatataggtatatttattccacacactctacaatatgccacaccatcttcataataaataaattcgttagcaaaattattaattttagtgaaatagttagcgtcaactttcatagcttccttcaatctaatttgatgctcacacggtgcgaattccactctaacatcccttttccatgcctcaggttcatcgatctctataatatctagttttttgcgtttcacaaacacaggctcgtctctcgcgatgagatctgtatagtaactatgtaaatgataactagatagaaagatgtagctatatagatgacgatcctttaagagaggtataataactttaccccaatcagatagactgttgttatggtcttcggaaaaagaatttttataaatttttccagtattttccaaatatacgtacttaacatctaaaaaatccttaatgataataggaatggataatccgtctattttataaagaaatacatatcgcacattatacttttttttggaaatgggaataccgatgtgtctacataaatatgcaaagtctaaatattttttagagaatcttagttggtccaaattcttttccaagtacggtaatagatttttcatattgaacggtatcttcttaatctctggttctagttccgcattaaatgatgaaactaagtcactatttttataactaacgattacatcacctctaacatcatcatttaccagaatactgatcttcttttgtcgtaaatacatgtctaatgtgttaaaaaaaagatcatacaagttatacgtcatttcatctgtggtattcttgtcattgaaggataaactcgtactaatctcttctttaacagcctgttcaaatttatatcctatatacgaaaaaatagcaaccagtgtttgatcatccgcgtcaatattctgttctatcgtagtgtataacaatcgtatatcttcttctgtgatagtcgatacgttataaaggttgataacgaaaatatttttatttcgtgaaataaagtcatcgtaggattttggacttatattcgcgtctagtagatatgcttttatttttggaatgatctcaattagaatagtctctttagagtccatttaaagttacaaacaactaggaaattggtttatgatgtataatttttttagtttttatagattctttattctatacttaaaaaatgaaaataaatacaaaggttcttgagggttgtgttaaattgaaagcgagaaataatcataaattatttcattatcgcgatatccgttaagtttgtatcgtaatggcgtggtcaattacgaataaagcggatactagtagcttcacaaagatggctgaaatcagagctcatctaaaaaatagcgctgaaaataaagataaaaacgaggatattttcccggaagatgtaataattccatctactaagcccaaaaccaaacgagccactactcctcgtaaaccagcggctactaaaagatcaaccaaaaaggaggaagtggaagaagaagtagttatagaggaatatcatcaaacaactgaaaaaaattctccatctcctggagtcagcgacattgtagaaagcgtggctgctgtagagctcgatgatagcgacggggatgatgaacctatggtacaagttgaagctggtaaagtaaatcatagtgctagaagcgatctttctgacctaaaggtggctaccgacaatatcgttaaagatcttaagaaaattattactagaatctctgcagtatcgacggttctagaggatgttcaagcagctggtatctctagacaatttacttctatgactaaagctattacaacactatctgatctagtcaccgagggaaaatctaaagttgttcgtaaaaaagttaaaacttgtaagaagtaaatgcgtgcacttttttataaagatggtaaactctttaccgataataattttttaaatcctgtatcagacgataatccagcgtatgaggttttgcaacatgttaaaattcctactcatttaacagatgtagtagtatatgaacaaacgtgggaggaggcgttaactagattaatttttgtgggaagcgattcaaaaggacgtagacaatacttttacggaaaaatgcatgtacagaatcgcaacgctaaaagagatcgtatttttgttagagtatataacgttatgaaacgaattaattgttttataaacaaaaatataaagaaatcgtccacagattccaattatcagttggcggtttttatgttaatggaaactatgttttttattagatttggtaaaatgaaatatcttaaggagaatgaaacagtagggttattaacactaaaaaataaacacatagaaataagtcccgatgaaatagttatcaagtttgtaggaaaggacaaagtttcacatgaatttgttgttcataagtctaatagactatataaaccgctattgaaactgacggatgattctagtcccgaagaatttctgttcaacaaactaagtgaacgaaaggtatacgaatgtatcaaacagtttggtattagaatcaaggatctccgaacgtatggagtcaattatacgtttttatataatttttggacaaatgtaaagtccatatctcctcttccgtcaccaaaaaagttaatagcgttaactatcaaacaaactgctgaagtggtaggtcatactccatcaatttcaaaaagagcttatatggcaacgactattttagaaatggtaaaggataaaaattttttagatgtagtatctaaaactacgttcgatgaattcctatctatagtcgtagatcacgttaaatcatctacggatggatgatatagatctttacacaaataattacaagaccgataaatggaaatggataagcgtatgaaatctctcgcaatgacagctttcttcggagagctaagcacattagatattatggcattgataatgtctatatttaaacgccatccaaacaataccattttttcagtggataaggatggtcagtttatgattgatttcgaatacgataattataaggcttctcaatatttggatctgaccctcactccgatatctggagatgaatgcaagactcacgcatcgagtatagccgaacaattggcgtgtgtggatattattaaagaggatattagcgaatatatcaaaactactccccgtcttaaacgatttataaaaaaataccgcaatagatcagatactcgcatcagtcgagatacagaaaagcttaaaatagctctagctaaaggcatagattacgaatatataaaagacgcttgttaataagtaaatgaaaaaaaactagtcgtttataataaaacacgatatggatgccaacgtagtatcatcttctactattgcgacgtatatagacgctttagcgaagaatgcttcagaattagaacagaggtctaccgcatacgaaataaataatgaattggaactagtatttattaagccgccattgattactttgacaaatgtagtgaatatctctacgattcaggaatcgtttattcgatttaccgttactaataaggaaggtgttaaaattagaactaagattccattatctaaggtacatggtctagatgtaaaaaatgtacagttagtagatgctatagataacatagtttgggaaaagaaatcattagtgacggaaaatcgtcttcacaaagaatgcttgttgagactatcgacagaggaacgtcatatatttttggattacaagaaatatggatcctctatccgactagaattagtcaatcttattcaagcaaaaacaaaaaactttacgatagactttaagctaaaatattttctaggatccggtgcccaatctaaaagttctttgttgcacgctattaatcatccaaagtcaaggcctaatacatctctggaaatagaattcacacctagagacaatgaaacagttccatatgatgaactaataaaggaattgacgactctctcgcgtcatatatttatggcttctccagagaatgtaattctttctccgcctattaacgcgcctataaaaacctttatgttgcctaaacaagatatagtaggtttggatctggaaaatctatatgccgtaactaagactgacggcattcctataactatcagagttacatcaaacgggttgtattgttattttacacatcttggttatattattagatatcctgttaagagaataatagattccgaagtagtagtctttggtgaggcagttaaggataagaactggaccgtatatctcattaagctaatagagcccgtgaatgcaatcagtgatagactagaagaaagtaagtatgttgaatctaaactagtggatatttgtgatcggatagtattcaagtcaaagaaatacgaaggtccgtttactacaactagtgaagtcgtcgatatgttatctacatatttaccaaagcaaccagaaggtgttattctgttctattcaaagggacctaaatctaacattgattttaaaattaaaaaggaaaatactatagaccaaactgcaaatgtagtatttaggtacatgtccagtgaaccaattatctttggagaatcgtctatctttgtagagtataagaaatttagcaacgataaaggctttcctaaagaatatggttctggtaagattgtgttatataacggcgttaattatctaaataatatctattgtttggaatatattaatacacataatgaagtgggtattaagtccgtggttgtacctattaagtttatagcagaattcttagttaatggagaaatacttaaacctagaattgataaaaccatgaaatatattaactcagaagattattatggaaatcaacataatatcatagtcgaacatttaagagatcaaagcatcaaaataggagatatctttaacgaggataaactatcggatgtgggacatcaatacgccaataatgataaatttagattaaatccagaagttagttattttacgaataaacgaactagaggaccgttgggaattttatcaaactacgtcaagactcttcttatttctatgtattgttccaaaacatttttagacgattccaacaaacgaaaggtattggcgattgattttggaaacggtgctgacctggaaaaatacttttatggagagattgcgttattggtagcgacggatccggatgctgatgctatagctagaggaaatgaaagatacaacaaattaaactctggaattaaaaccaagtactacaaatttgactacattcaggaaactattcgatccgatacatttgtctctagtgtcagagaagtattctattttggaaagtttaatatcatcgactggcagtttgctatccattattcttttcatccgagacattatgctaccgtcatgaataacttatccgaactaactgcttctggaggcaaggtattaatcactaccatggacggagacaaattatcaaaattaacagataaaaagacttttataattcataagaatttacctagtagcgaaaactatatgtctgtagaaaaaatagctgatgatagaatagtggtatataatccatcaacaatgtctactccaatgactgaatacattatcaaaaagaacgatatagtcagagtgtttaacgaatacggatttgttcttgtagataacgttgatttcgctacaattatagaacgaagtaaaaagtttattaatggcgcatctacaatggaagatagaccgtctacaaaaaactttttcgaactaaatagaggagccattaaatgtgaaggtttagatgtcgaagacttacttagttactatgttgtttatgtcttttctaagcggtaaataataatatggtatgggttctgatatccccgttctaaatgcattaaataattccaatagagcgatttttgttcctataggaccttccaactgtggatactctgtattgttaatagatatattaatacttttgtcgggtaacagaggttctacgtcttctaaaaataaaagttttataacatctggcctgttcataaataaaaacttggcgattctatatatactcttattatcaaatctagccattgtcttatagatgtgagctactgtaggtgtaccatttgattttctttctaatactatatatttctctcgaagaagttcttgcacatcatctgggaataaaatactactgttgagtaaatcagttattttttttatatcgatattgatggacatttttatagttaaggataataagtatcccaaagtcgataacgacgataacgaagtatttatacttttaggaaatcacaatgactttatcagattaaaattaacaaaattaaaggagcatgtatttttttctgaatatattgtgactccagatacatatggatctttatgcgtcgaattaaatgggtctagttttcagcacggtggtagatatataaaggtggaggaatttatagatgctggaagacaagttagatggtgttctacatccaatcatatatctaaagatatacccgaagatatgcacactgataaatttgtcatttatgatatatacacttttgacgctttcaagaataaacgattggtattcgtacaggtacctccgtcgttaggagatgatagtcatttgactaatccgttattgtctccgtattatcgtaattcagtagccagacaaatggtcaataatatgatttttaatcaagattcatttttaaaatatttattagaacatctgattagaagccactatagagtttctaaacatataacaatagttagatacaaggataccgaagaattaaatctaacgagaatatgttataatagagataagtttaaggcgtttgtattcgcttggtttaacggcgtttcggaaaatgaaaaggtactagatacgtataaaaaggtatctaatttgatataatgaattcagtgactgtatcacacgcgccatatactattacttatcacgatgattgggaaccagtaatgagtcaattggtagagttttataacgaagtagccagttggctgctacgagacgagacgtcgcctattcctgataagttctttatacagttgaaacaaccgcttagaaataaacgagtatgtgtgtgcggtatagatccgtatccgaaagatggaactggtgtaccgttcgaatcaccaaattttacaaaaaaatcaattaaggagatagcttcatctatatctagattaaccggagtaattgattataaaggttataaccttaatataatagacggggttataccctggaattattacttaagttgtaaattaggagaaacaaaaagtcacgcgatctactgggataagatttccaagttactgctgcagcatataactaaacacgttagtgttctttattgtttgggtaaaacagatttctcgaatatacgggcaaagttagaatccccggtaactaccatagtcggatatcatccagcggctagagaccgccaattcgagaaagatagatcatttgaaattatcaacgttttactggaattagacaacaaggcacctataaattgggctcaagggtttatttattaatgctttagtgaaattttaacttgtgttctaaatggatgcggctattagaggtaatgatgttatctttgttcttaagactataggtgtcccgtcagcgtgcagacaaaatgaagatccaagatttgtagaagcatttaaatgcgacgagttagaaagatatattgagaataatccagaatgtacactattcgaaagtcttagggatgaggaagcatactctatagtcagaattttcatggatgtagatttagacgcgtgtctagacgaaatagattatttaacggctattcaagattttattatcgaggtgtcaaactgtgtagctagattcgcgtttacagaatgcggtgccattcatgaaaatgtaataaaatccatgagatctaatttttcattgactaagtctacaaatagagataaaacaagttttcatattatctttttagacacgtataccactatggatacattgatagctatgaaacgaacactattagaattaagtagatcatctgaaaatccactaacaagatcgatagacactgccgtatataggagaaaaacaactcttcgggttgtaggtactaggaaaaatccaaattgcgacactattcatgtaatgcaaccaccgcatgataatatagaagattacctattcacttacgtggatatgaacaacaatagttattacttttctctacaacaacgattggaggatttagttcctgataagttatgggaaccagggtttatttcattcgaagacgctataaaaagagtttcaaaaatattcattaattctataataaactttaatgatctcgatgaaaataattttacaacggtaccactggtcatagattacgtaacaccttgtgcattatgtaaaaaacgatcgcataaacatccgcatcaactatcgttggaaaatggtgctattagaatttacaaaactggtaatccacatagttgtaaagttaaaattgttccgttggatggtaataaactgtttaatattgcacaaagaattttagacactaactctgttttattaaccgaacgaggagaccatatagtttggattaataattcatggaaatttaacagcgaagaacccttgataacaaaactaattttgtcaataagacatcaactacctaaggaatattcaagcgaattactctgtccgaggaaacgaaagactgtagaagctaacatacgagacatgttagtagattcagtggagaccgatacctatccggataaacttccgtttaaaaatggtgtattggacctggtagacggaatgttttactctggagatgatgctaaaaaatatacgtgtactgtatcaaccggatttaaatttgacgatacaaagttcgtcgaagacagtccagaaatggaagagttaatgaatatcattaacgatatccaaccattaacggatgaaaataagaaaaatagagagctatatgaaaaaacattatctagttgtttatgcggtgctaccaaaggatgtttaacattcttttttggagaaactgcaactggaaagtcgacaaccaaacgtttgttaaagtctgctatcggtgacctgtttgttgagacgggtcaaacaattttaacagatgtattggataaaggacctaatccatttatcgctaacatgcatttgaaaagatctgtattctgtagcgaactacctgattttgcctgtagtggatcaaagaaaattagatctgacaatattaaaaagttgacagaaccttgtgtcattggaagaccgtgtttctccaataaaattaataatagaaaccatgcgacaatcattatcgatactaattacaaacctgtttttgataggatagataacgcattaatgagaagaattgccgtcgtgcgattcagaacacacttttctcaaccttctggtagagaggctgctgaaaataatgacgcgtacgataaagtcaaactattagacgaggggttagatggtaaaatacaaaataatagatatagattcgcatttctatacttgttggtgaaatggtacagaaaatatcatgttcctattatgaaactatatcctacacccgaagagattcctgactttgcattctatctcaaaataggtactctgttagtatctagctctgtaaagcatattccattaatgacggacctctccaaaaagggatatatattgtacgataatgtggttactcttccgttgactactttccaacagaaaatatccaagtattttaattctagactatttggacacgatatagagagcttcatcaatagacataagaaatttgccaatgttagtgatgaatatctgcaatatatattcatagaggatatttcatctccgtaaatatatgctcatatatttatagaagatatcacatatctaaatgaataccggaatcatagatttatttgataatcatgttgatagtataccaactatattacctcatcagttagctactctagattatctagttagaactatcatagatgagaacagaagcgtgttattgttccatattatgggatcaggtaaaacaataatcgctttgttgttcgccttggtagcttccagatttaaaaaggtttacattctagtgccgaacatcaacatcttaaaaattttcaattataatatgggtgtagctatgaacttgtttaatgacgaattcatagctgagaatatctttattcattccacaacaagtttttattctcttaattataacgataacgtcattaattataacggattatctcgctacaataactctatttttatcgttgatgaggcacataatatctttgggaataatactggagaacttatgaccgtgataaaaaataaaaacaagattccttttttactattgtctggatctcccattactaacacacctaatactctgggtcatattatagatttaatgtccgaagagacgatagattttggtgaaattattagtcgtggtaagaaagtaattcagacacttcttaacgaacgaggtgtgaatgtacttaaggatttgcttaaaggaagaatatcatattacgaaatgcctgataaagatctaccaacgataagatatcacggacgtaagtttctagatactagagtagtatattgtcacatgtctaaacttcaagagagagattatatgattactagacgacagctatgttatcatgaaatgtttgataaaaatatgtataacgtgtcaatggcagtattgggacaacttaatctgatgaataatttagatactttatttcaggaacaggataaggaattgtacccaaatctgaaaataaataatggcgtgttatacggagaagaattggtaacgttaaacattagttccaaatttaaatactttattaatcggatacagacactcaacggaaaacattttatatacttttctaattctacatatggcggattggtaattaaatatatcatgctcagtaatggatattctgaatataatggttctcagggaactaatccacatatgataaacggcaaaccaaaaacatttgctatcgttactagtaaaatgaaatcgtctttagaggatctattagatgtgtataattctcctgaaaacgatgatggtagtcaattgatgtttttgttttcatcaaacattatgtccgaatcctatactctgaaagaggtaaggcatatttggtttatgactatcccagatactttttctcaatacaaccaaattcttggacgatctattagaaaattctcttacgccgatatttctgaaccagttaatgtatatcttttagccgccgtatattccgatttcaatgacgaagtgacgtcattaaacgattacacacaggatgaattaattaatgttttaccatttgacatcaaaaagctgttatatctaaaatttaagacgaaagaaacgaatagaatatactctattcttcaagagatgtctgaaacgtattctcttccaccacatccatcaattgtaaaagttttattgggagaattggtcagacaatttttttataataattctcgtattaagtataacgataccaagttacttaaaatggttacatcagttataaaaaataaagaagacgctaggaattacatagatgatattgtaaacggtcacttctttgtatcgaataaagtatttgataaatctcttttatacaaatacgaaaacgatattattacagtaccgtttagactttcctacgaaccatttgtttggggagttaactttcgtaaagaatataacgtggtatcttctccataaaactgatgagatatataaagaaataaatgtcgagctttgttaccaatggatacctttccgttacattggaaccacacgagctgacgttagacataaaaactaatattaggaatgccgtatataagacgtatctccatagagaaattagtggtaaaatggccaagaaaatagaaattcgtgaagacgtggaattacctctcggcgaaatagttaataattctgtagttataaacgttccgtgtgtaataacctacgcgtattatcacgttggggatatagtcagaggaacattaaacatcgaagatgaatcaaatgtaactattcaatgtggagatttaatctgtaaactaagtagagattcgggtactgtatcatttagcgattcaaagtactgcttttttcgaaatggtaatgcgtatgacaatggcagcgaagtcactgccgttctaatggaggctcaacaaggtatcgaatctagttttgtttttctcgcgaatatcgtcgactcataaaaaagagaatagcggtaagtataaacacgaatactatggcaataattgcgaatgttttattctcttcgatatatttttgataatatgaaaaacatgtctctctcaaatcggacaaccatctcataaaatagttctcgcgcgctggagaggtagttgccgctcgtataatctctccagaataatatacttgcgtgtcgtcgttcaatttatacggatttctatagttctctgttatataatgcggtttgccctcatgattagacgacgacaatagtgttctaaatttagatagttgatcagaatgaatgtttattggcgttggaaaaattatccatacagcgtctgcagagtggttgatagttgttcctagatatgtaaaataatccaacttactaggcagcaaattgtctagataaaatactgaatcaaacggtgcagacgtattggcggatctaatggaatccaattgattaactatcttttgaaaatatacatttttatgatccaatacttgtaagaatatagaaataatgataagtccatcatcgtgtttttttgcctcttcataagaactatattttttcttattccaatgaacaagattaatctctccagagtatttgtacacatctatcaagtgattggatccataatcgtcttcctttccccaatatatatgtagtgatgataacacatattcattggggagaaaccctccacttatatatcctcctttaaaattaatccttactagttttccagtgttctggatagtggttggtttcgactcattataatgtatgtctaacggcttcaatcgcgcgttagaaattgcttttttagtttctatattaataggagatagttgttgcggcatagtaaaaatgaaatgataactgtttaaaaatagctcttagtatgggaattacaatggatgaggaagtgatatttgaaactcctagagaattaatatctattaaacgaataaaagatattccaagatcaaaagacacgcatgtgtttgctgcgtgtataacaagtgacggatatccgttaataggagctagaagaacttcattcgcgttccaggcgatattatctcaacaaaattcagattctatctttagagtatccactaaactattacggtttatgtactacaatgaactaagagaaatctttagacggttgagaaaaggttctatcaacaatatcgatcctcactttgaagagttaatattattgggtggtaaactagataaaaaggaatctattaaagattgtttaagaagagaattaaaagaggaaagtgatgaacgtataacagtaaaagaatttggaaatgtaattctaaaacttacaacacgggataaattatttaataaagtatatataagttattgcatggcgtgttttattaatcaatcgttggaggatttatcgcatactagtatttacaatgtagaaattagaaagattaaatcattaaatgattgtattaacgacgataaatacgaatatctgtcttatatttataatatgctagttaatagtaaatgaacttttacagatctagtataattagtcagattattaagtataatagacgactagctaagtctattatttgcgaggatgactctcaaattattacactcacggcattcgttaaccaatgcctatggtgtcataaacgagtatccgtgtccgctattttattaactactgataacaaaatattagtatgtaacagacgagatagttttctctattctgaaataattagaactagaaacatgtttagaaaaaaacgattatttctgaattattccaattatttgaacaaacaggaaagaagtatactatcgtcatttttttctctagatccagctactactgataatgatagaatagacgctatttatccgggtggcatacccaaaaggggtgagaatgttccagagtgtttatccagggaaattaaagaagaagttaatatagacaattcttttgtattcatagacactcggttttttattcatggcatcatagaagataccattattaataaattttttgaggtaatcttctttgtcggaagaatatctctaacgagtgatcaaatcattgatacatttaaaagtaatcatgaaatcaaggatctaatatttttagatccgaattcaggtaatggactccaatacgaaattgcaaaatatgctctagatactgcaaaacttaaatgttacggccatagaggatgttattatgaatcattaaaaaaattaactgaggatgattgattaaaaaatataaattaatttaccatcgtgtatttttataacgggattgtccggcatatcatgtagatagttaccgtctacatcgtatactcgaccatctacgcctttaaatcctctatttattgacattaatctattagaattggaataccaaatattagtaccctcaattagtttattggtaatattttttttagacgatagatcgatggctcttgaaaccaaggttttccaaccggactcattgtcgatcggtgagaagtctttttcattagcatgaatccattctaatgatgtatgtttaaacactctaaacaattggacaaattcttttgatttgctttgaatgatttcaaataggtcttcgtctacagtaggcataccattagataatctagccattataaagtgcacgtttacatatctacgttctggaggagtaagaacgtgactattgagacgaatggctcttcctactatctgacgaagagacgcctcgttccatgtcatatctaaaatgaagatatcattaattgagaaaaaactaataccctcgcctccactagaagagaatacgcatgttttaatgcattctccgttagtgtttgattcttggttaaactcagccaccgccttgattctagtatcttttgttctagatgagaactctatattagagataccaaagactttgaaatatagtaataagatttctattcctgactgattaacaaatggttcaaagactagacatttaccatgggatgctaatattcccaaacatacatctataaatttgacgcttttctcttttaattcagtaaatagagagatatcagccgcactagcatcccctttcaatagttctccctttttaaaggtatctaatgcggatttagaaaactctctatctcttaatgaatttttaaaatcattatatagtgttgctatctcttgcgcgtattcgcccggatcacgattttgtctttcaggaaagctatcgaacgtaaacgtagtagccatacgtctcagaattctaaatgatgatatacctgtttttatttcagcgagtttagccttttgataaatttcttcttgctttttcgacatattaacgtatcgcattaatactgttttcttagcgaatgatgcagacccttctacgtcatcaaaaatagaaaactcgttattaactatatacgaacatagtcctcctagtttggagactaattctttttcatcgactagacgtttattctcaaatagtgattggtgttgtaaggatcctggtcgtagtaagttaaccaacatggtgaattcttgcacactattgacgataggtgtagccgataaacaaatcatcttatggttttttaacgcaatggtcttagataaaaaattatatactgaacgagtaggacggatcttaccatcttctttgattaatgatttagaaatgaagttatgacattcatcaatgatgacgcatattctactcttggaattaatagttttgatattagtaaaaaatttatttctaaaattttgatcatcgtaattaataaaaatacaatccttcgttatctctggagcgtatctgagtatagtgttcatccaaggatcttctatcaaagcctttttcaccaataagataatagcccaattcgtataaatatccttaagatgtttgagaatatatacagtagtcattgttttaccgacacccgtttcatggaacaataaaagagaatgcatactgtctaatcctaagaaaactcttgctacaaaatgttgataatccttgaggcgtactacgtccgaccccatcatttcaacaggcatattagtagttctgcgcaatgcataatcgatataggccgcgtgtgatttactcatttatgagtgataagtaataactatgttttaaaaatcacagcagtagtttaactagtcttctctgatgtttgttttcgatactttttgaatcagaagtcatactagaataaagcaacgagtgaacgtaatagagagcttcgtatactctattcgaaaactctaagaacttattaatgaattccgtatccactggattgtttaaaatactaaattgaacactgttcacatccttccaagaagaagacttagtgacggacttaacatgagacataaataaatccaaattttttttacaaacatcactagccaccataatggcgctatctttcaaccagctatcgcttacgcattttagcagtctaacatttttaaagagactacaatatattctcatagtatcgattacacctctaccgaataaagttggaagtttaataatacaatatttttcgtttacaaaatcaaataatggtcgaaacacgtcgaaggttaacatcttataatcgctaatgtatagattgttttcagtgagatgattattagatttaatagcatctcgttcacgtttgaacagtttattgcgtgcgctgaggtcggcaactacggcgtccgctttagtactcctcccataatactttacgctattaatctttaaaatttcatagactttatctagatcgctttctggtaacatgatatcatgtgtaaaaagttttaacatgtcggtcggcattctatttagatcattaactctagaaatctgaagaaagtaattagctccgtattccagactaggtaatgggcttttacctagagacagattaagttctggcaatgtttcataaaatggaagaaggacatgcgttccctcccggatattttttacaatttcatccatttacaactctatagtttgttttcattattattagttattatctcccataatcttggtaatacttaccccttgatcgtaagataccttatacaggtcattacatacaactaccaattgtttttgtacataatagattggatggttgacatccatggtggaataaactactcgaacagatagtttatctttccccctagatacattagccgtaatagttgtcggcctaaagaatatctttggtgtaaagttaaaagttagggttcttgttccattattgctttttgtcagtagttcattataaattctcgagatgggtccgttctctgaatatagaacatcatttccaaatctaacttctagtctagaaataatatcggtcttattcttaaaatctattcccttgatgaagggatcgttaatgaacaaatccttggcctttgattcggctgatctattatctccgttatagacgttacgttgactagtccaaagacttacaggaatagatgtatcgatgatgttgatactatgtgatatgtgagcaaagattgttctcttagtggcatcactatatgttccagtaatggcggaaaactttttagaaatgttatatataaaagaattttttcgtgttccaaacattagcagattagtatgaagataaacactcatattatcaggaacattatcaatttttacatacacatcagcatcttgaatagaaacgataccatcttctggaacctctacgatctcagcagactccggataaccagtcggtggaccatcgctaacaataactagatcatccaacaatctactcacatatgcatctatataatctttttcatcttgtgagtaccctggatacgaaataaatttattatccgtatttccataataaggtttagtataaacagagagagatgttgccgcatgaacttcagttacagtcgccgttggttggtttatttgacctattactctcctaggtttctctataaacgatggtttaatttgtacattcttaaccatatatccaataaagctcaattcaggaacataaacaaattctttgttgaacgtttcaaagtcgaacgaagagtcacgaataacgatatcggatactggattgaaggttaccgttacggtaatttttgaatcggatagtttaagactgctgaatgtatcttccacatcaaacggagttttaatataaacgtatactgtagatggttctttaatagtgtcattaggagttaggccaatagaaatatcattaagttcactagaatatccagagtgtttcaaagcaattgtattattgatacaattattatataattcttcgccctcaatttcccaaataacaccgttacacgaagagatagatacgtgattaatacatttatatccaacatatggtacgtaactgaatcttcccatacctttaacttctggaagttccaaactcagaaccaaatgattaagcgcagtaatatactgatccctaatttcgaagctagcgatagcctgattgtctggaccatcgtttgtcataactccggatagagaaatatattgcggcatatataaagttggaatttgactatcgactgcgaagacattagaccgtttaatagagtcatccccaccgatcaaagaattaatgatagtattattcattttctatttaaaatggaaaaagcttacaataaactccgtagagaaatatctataatttgtgagttttccttaaagtaacagcttccgtaaacgccgtctttatctcttagtaagtttattgtatttatgaccttttccttatcttcatagaatactaaaggcaacaaagaaatttttggttcttctctaagagctacgtgagacttaaccatagaagccaacgaatccctacatattttagaacagaaataccctacttcaccacccttgtatgtctcaatactaataggtctaaaaaccaaatcttgattacaaaaccaacacttatcaattacactatttgtcttaatagacacatctgccatagatttataatactttggtagtatacaagcgagtgcttcttctttagcgggcttaaagactgctttaggtgctgaaataaccacatctggaaggcttactcgcttagccatttaattacggaactatttttttatacttctaatgagcaagtagaaaacctctcatctacaaaaacgtactcgtgtccataatcctctaccatagttacacgttttttagatctcatatgtgctaaaaagttttcccatactaattggttactattatttttcgtataatttttaacagtttgaggttttagatttttagttacagaagtgatatcgaatattttatccaaaaagaatgaataattaattgtcttagaaggagtgttttcttggcaaaagaataccaagtgcttaaatatttctactacttcattaatcttttctgtactcagattcagtttctcatcttttacttgattgattatttcaaagactaacttataatcctttttatttattctctcgttagccttaagaaaactagatacaaaatttgcatctacatcatccgtggatatttgatttttttccatgatatccaagagttccgagataatttctccagaacattgatgagacaataatctccgcaatacatttctcaaatgaataagtttattagacacgtggaagtttgactttttttgtacctttgtacatttttgaaataccgactcgcaaaaaatacaatattcatatccttgttcagatactataccgttatgtctacaaccgctacataatcgtagattcatgttaacactctacgtatctcgtcgtccaatattttatataaaaacattttatttctagacgttgccagaaaatcctgtaatatttttagttttttgggctgtgaataaagtatcgccctaatattgttaccgtcttccgccaatatagtagttaaattatccgcacatgcagaagaacaccgcttaggcggattcagtacaatgttatatttttcgtaccaactcatttaaatatcataatctaaaatagttctgtaatatgtctagcgctaatatattgatcataatcctgtgcataaattaagatacaacaatgtctcgaaatcatcgacatggcttcttccatagttagaagatcgtcgtcaaagttagcaacgtgattcatcaacatttgctgttttgaggcagcaaatactgaaccgtcgccattcaaccattcataaaaaccatcgtctgaatccattgataatttcttgtactggtttttgagagctcgcatcaatctagcatttctagctcccggattgaaaacagaaagaggatcgtacatccagggtccattttctgtaaatagaatcgtataatgtcccttcaagaaaatatcagacgatccacaatcaaagaattggtctccgagtttgtaacagacagcggactttaacctatacatgataccgtttagcataatttctggtgatacgtcaatcggagtatcatctattagagatctaaagccggtgtaacattctccaccaaacatattcttattctgacgtcgttctacataaaacatcattgctccattaacgataacaggggaatgaacagcactacccatcacattagttcccaatggatcaatgtgtgtaactccagaacatcttccatagcctatgttaggaggagcgaacaccactcttccactattgccatcgaatgccatagaataaatatccttggaattgatagaaatcggactgtcggatgttgtgatcatcttcataggattaacaactatgtatggtgccgcctgaagtttcatatcgtaactgatgccgtttataggtctagccacagaaaccaacgtaggtctaaatccaactatagacaaaatagaagccaatatctgttcctcatctgtcataacttgagagcatccagtatgaataatcttcattagatggggatctaccgcatcatcatcgttacaataaaaaattcccattctaatgttcataattgcttttctaatcatggtatgcatgtttgctctctgaatctctgtggaaattagatctgatacacctgtaatcactatcggattatcctccgtaagacgattaaccaacaacatataattataagactttacttttctaaattcataaagttgctggattaggctataggtgtctccatgtacatacgcgttctcgagcgcaggaagtttaataccgaatagtgccatcagaataggatgaatatagtaattagtttctggttttctataaataaaagacaaatcttgtgaactagacatatcggtaaaatgcatggattggaatcgtgtagtcgacagaagaatatgatgattagatggagagtatattttatctaactctttgagttggtcaccgattctaggactagctcgagaatgaataagtactaaaggatgagtacatttcacagaaacactagcattgttcaatgtgctctttacatgggtaaggagttgaaatagctcgtttctatttgttctgacaatatttagtttattcataatgttaagcatatcctgaatagtaaagttagatgtgtcatacttgttagtagttagatatttagcaattgcattcccatcatttctcaatctcgtactccaatcatgtgtagatgctacttcatctatagaaaccatacaatcctttttgataggctgttgagattgattatttcctgcacgtttaggtttggtacgttgatttctagcccctgcggatataaagtcatcgtctacaatttgggacaatgaattgcatacactacaagacaaagatttatcagaagtgtgaatatgatcttcatctaccaaagaaagagtttgattagtataactagattttagtcctgcgttagatgttaaaaaaacatcgctattgaccacggcttccattatttatattcgtagtttttactcgaaagcgtgattttaatatccaatcttattacttttggaatcgttcaaaacctttgactagttgtagaatttgatctattgccctacgcgtatactcccttgcatcatatacgttcgtcaccagatcgtttgtttcggcctgaagttggtgcatatctctttcaacattcgacatgagatccttaagggccatatcgtctagattttgttgagatgttgctcctggatttggattttgttgtgctgttgtacatactgtaccaccagtaggtgtaggagtacatacagtggccacaataggaggttgaggaggtgtaaccgttggagtagtacaagaaatacttccatccgattgttgtgtacatgtagttgttggtaacgtctgagaaggttgggtagatggcggtgtcgtcgtcttttgatctttattaaatttagagataatatcctgaacagcattgctcggcgtcaacgctggaaggagtgaactcgccggcgcatcagtatcttcagacagccaatcaaaaagattagacatatcagatgatgtattagtttgttgtcgtggttttggtgtaggagcagtactactaggtagaagaataggagccgatgtagctgttggaaccggctgtggagttatatgaatagttggttgtagcggttggataggctgtctgctggcggccatcatattatctctagctagttgttctcgcaactgtctttgataatacgactcttgagactttagtcctatttcaatcgcttcatcctttttcgtatccggatccttttcttcagaataatagattgacgactttggtgtagaggattctgccagcctctgtgagaacttgttaaagaagtccatttaaggctttaaaattgaattgcgattataagattaaatggcagacacagacgatattatcgactatgaatccgatgatctcaccgaatacgaggatgatgaagaagaggaagaagatggagagtcactagaaactagtgatatagatcccaaatcttcttataagattgtagaatcagcatccactcatatagaagatgcgcattccaatcttaaacatatagggaatcatatatctgctcttaaacgacgctatactagacgtataagtctatttgaaatagcgggtataatagcagaaagctataacttgcttcaacgaggaagattacctctagtttcagaattttctgacgaaacgatgaagcaaaatatgctacatgtaattatacaagagatagaggagggttcttgtcctatagtcatcgaaaagaacggagaattgttgtcggtaaacgattttgacaaagatggtctaaaattccatctagactatattatcaaaatttggaaacttcaaaaacgatattagaatttatacgaatatcgttctctaaatgtcacaatcaagtctcgcatgttcagcaatttattgtcgtactttatatcgtgttcattaacgatatcttgcaaaatagtaatgattctatcttccttcgatagatattcttcagagattattgtcttatattctttcttgttatcagatatgaatttgataagactttgaacattattgatacccgtctgtttaattttttctacagatattttagttttggcagattctatcgtatctgtcaatagacatccaacatcgacattcgacgtcaattgtctataaatcaacgtataaattttagaaataacattagcgaattgttgtgcgttgatgtcgttattctgaaacagtatgattttaggtagcattttcttaacaaagagaacgtatttattgttactcagttgaacagatgatatatccagattactaacgcatctgattccgtataccaaactttcagaagaaatggtatacaattgtttgtattcattcaatgtctctttttcagaaattagtttagagtcgaatactgcaataattttcaagagatagttttcatcagataagattttatttagtgtagatatgataaaactattgttttgttggagaacttgatacgccgcgttctctgtagtcgacgctctcaaatgggaaacaatctccattatttttttggaatcggatactatatcttcggtatcttgacgcagtctagtatacatagagttaagagagattagagtttgtacattaagcaacatgtctctaaatgtggctacaaacttttcctttttcacatcatctagtttattatataccgatttcacaacggcaccagatttaaggaaccagaatgaaaaactctgataactacaatatttcatcatagttacgattttatcatcttctatagttggtgtaatagcgcatacctttttctccaagactggaaccaacgtcataaaaatgtttaaatcaaaatccatatcaacatctgatgcgctaagaccagtctcgcgttcaagattatctttactaatggtgacgaactcatcgtataaaactctaagtttgtccattatttatttacagatttagttgtttaatttatttgtgctcttccagagttgggatagtatttttctaacgtcggtattatattattaggatctacgttcatatgtatcataatattaatcatccacgttttgataaatctatctttagcttctgaaataacgtatttaaacaaaggagaaaaatatttagctacggcatcagacgcaataacattttttgtaaatgtaacgtatttagacgacagatcttcgttaaaaagttttccatctatgtagaatccatcggttgttaacaccattcccgcgtcagattgaataggagtttgaatagtttgttttggaaatagatccttcaataacttatagttgggtgggaaaaaatcgattttatcactagactctttcttttttactatcattacctcatgaactatttcttgaatgagtatatgtattttctttcctatatcggacgcgttcattggaaaatataccatgtcgttaactataagaatatttttatcctcgtttacaaactgaataatatcagatgtagttcgtaaacgaactatatcatcaccagcacaacatctaactatatgatatccactagtttcctttagccgtttattatcttgttccatattagcagtcattccatcatttaagaaggcgtcaaagataatagggagaaatgacattttggattctgttacgactttaccaaaattaaggatatacggacttactatctttttctcaacgtcaatttgatgaacacacgatgaaaatgtgcttctatgagattgatcatgtagaaaacaacaagggatacaatatttccgcatatcatgaaatatattaagaaatcccaccttattatatttccccaaaggatccatgcacgtaaacattatgccgttatcattaataaagacttctttctcatcggatctgtaaaagttgttactgatttttttcattccaggatctagataattaataatgatgggttttctattcttattctttgtattttggcatatcctagaccagtaaacagtttccactttggtaaaatcagcagacttttgaacgctattaaacatggcattaatggcaataactaaaaatgtaaaatatttttctatgttaggaatatggtttttcactttaatagatatatggtttttggccaaaatgatagatatttttttatccgaggatagtaaaatattattagtcgccgtctctataaaaatgaagctagtctcgatatccaattttattctagaattgataggagtcgccaaatgtaccttatacgttatatctcccttgatgcgttccatttgtgtatctatatcggacacaagatctgtaaatagttttacgttattaatcatcacggtatcgccgtcgctagataacgctaatgtaccatccaagtcccaaatggagagatttaactgttcatcgtttagaataaaatgattaccggtcatattaataaagtgttcatcgtatctagataacaacgacttataattaatgtccaagtcttgaactcgctgaatgatcttttttaacccagttagttttagattggtacgaaatatattgttaaactttgattctacagtaatgtccaaatctagttgtggaaatacttccatcaacattgtttcaaacttgataatattattatctacatcttcgtacgatccaaattccggaatagatgtatcgcacgctctggccacccagataaccaaaaagtcacacgctccaggatatacattgtataaaaagctatcgttttttagtagggtttttttctgcgtgtatacgaagggattaaaaatagtattatcaacgtaactatattccaaattattcttatgagaatagataataatatcgtccttaatatctaacaaatttcctaaatatccctttaattgagtcattcgaagcgtcaatagaatatgtctcttaactatttccggctgttgtatatttaaatgacttcgtaaaaaataatatatgggcgacttctcatctatgtaatcatatggagtgagatatagggctcgttctacctcctgccccttacccacctgtaataccaattgcggacttactatatatcgcatatttatatcgtggggtaaagtgaaaatctactaccgatgatgtaagtcttacaatgttcgaaccagtaccagatcttaatttggaggcctccgtagaactaggggaggtaaatatagatcaaacaacacctatgataaaggagaatagcggttttatatcccgcagtagacgtctattcgcccatagatctaaggatgatgagagaaaactagcactacgattctttttacaaagactttattttttagatcatagagagattcattatttgttcagatgcgttgacgctgtaaaagacgtcactattaccaaaaaaaataacattatcgtggcgccttatatagcacttttaactatcgcatcaaaaggatgcaaacttacagaaacaatgattgaagcattctttccagaactatataatgaacatagtaagaaatttaaattcaactctcaagtatccatcatccaagaaaaactcggataccagtttggaaactatcacgtttatgattttgaaccgtattactctacagtagctctggctattcgagatgaacattcatctggcatttttaatatccgtcaagagagttatctggtaagttcattatctgaaataacatatagattttatctaattaatctaaaatctgatcttgttcaatggagtgctagtacgggcgctgtaattaatcaaatggtaaatactgtattgattacagtgtatgaaaagttacaactggtcatagaaaatgattcacaatttacatgttcattggctgtggaatcaaaacttccaataaaattacttaaagatagaaatgaattatttacaaaattcattaacgagttaaaaaagaccagttcattcaagataagcaaacgcgataaggatacgctactaaaatattttacttaggactggagttagaatttatagacgactcatttcgtttatcattgttactattattactattactatcattattagtgttggcattattagtattcttcttgtcatcttgttcagaaatatacagcaatgctatacctaatactaaatacattatcatgctcgcaatggctctaacaacaacgaaccaaaatgaatttggtcgtagcttttgttcacaaaaatacataaagaaatgtctacataaatctatggcgccattggctacttgaaatagcgccagtcctcctacagattttaatatagctgtataacatgacatttattcatcatcaaaagagacagagtcaccatctgtcatatttagattttttttcatgtgttcaaagtatcctctactcatttcattataatagtttatcatacttagaattttaggacggatcaatgagtaagacttgactagatcgtcagtagtaatttgtgcatcgtctattctgcatccgcttcgtcgaataatgtatagcatcgctttgagattctccatagctatcaagtctttatacaatgacatggaaatatctgtgaatactttatacttctccaacatcgatgccttaacatcatcgcctactttagcattgaaaatacgttctattgtgtagatggatgtagcaagatttttaaacaacaatgccatcttacacgatgattgcctcaagtctccaatcgtttgtttagaacgattagctacagagtccaatgcttggctgactagcatattattatctttagaaattgtattcttcaatgaggcgtttatcatatctgtgatttcgttagtcatattacagtctgactgggttgtaatgttatccaacatatcacctatggatacggtacacgtaccagcatttgtaataatcctatctaagatgttgtatggcattgcgcagaaaatatcttctcctgtaatatctccactctcgataaatctactcagattattcttaaatgccttattctctggagaaaagatatcagtgtccatcatttcattaatagtatacgcagaaaagataccacgagtatcaattctatccaagatacttatcggttccgagtcacagataatggtttcctctccttcgggagatcctgcatagaaatatctaggacaatagtttctatactgtctgtaactctgataatctctaaagtcactaactgataccatgaaattgagaagatcaaacgctgaagtaattaatttttctgcctcgtttttactacaactagttttcatcaatgtagtgacgatgtattgtttagttacttttggtctaatactgatgatagagatattattgcttcccataatggatcttctagtagtcaccttaaagcccattgatgcgaatagcagatagataaagtcttggtatgactcctttctaatatagtacggactacctttgtcacccaactttatacccacataagccataacaacctctttaatagccgtttcatgaggtttatcagccatgagcctgagtagttggaagaatctcatgaatcccgtctcagaaagtcctatatgcatgatagatttatctttcctgggaaactctcgtatagtcatagatgaaatactcttcaaagtttctgaaataagattagtaacagtcttacctccgactactctaggtaacaaacaaactctaataggtgttttctctgcggagataatatcagaaaggatagagcaataagtagtattattgtgattataaagaccgaatacataacaggtagaatttataaacatcatgtcctgaaggtttttagacttgtattcctcgtaatccataccgtcccaaaacatggatttggtaactttgatagccgtagatctttgttccttcgccaacaggttaaagaaattaataaagaatttgttgtttctatttatgtccacaaattgcacgtttggaagcgccacggttacattcactgcagcattttgaggatcgcgagtatgaagtacgatgttattgtttactggtatatctggaaagaaatctaccagtctaggaataagagattgatatcgcatagaaatagtaaagtttataatctcatcatcgaagagcattttgttaccattgtaataaatatccactctgtcatatgtataaatgaagtactgttcaaacatgatgagatgtttatatgttggcatagtagtgagatcgacgtttggtaatggcaatgtattaagattaactccataatgtctagcagcatctgcgatgttataagcgtcgtcaaagcggggtcgatcttgtattgttatatattgtctaacacctataagattatcaaaatcttgtctgcttaatacaccgttaacaatttttgccttgaattcttttattggtgcattaataacatccttatagaggatgttaaacaaataagtgttatcaaagttaagatctggatatttcttttctgctagaacatccattgagtcggagccatctggtttaatataaccaccgataaatctagctctgtattctgtatccgtcaatctaatattaagaaggtgttgagtgaaaggtggaagatcgtaaaagctgtgagtattaatgataggattagtttccgaactaatgttaattggggtattaataatatctatatttccagcgttaagtgtaacattaaacagttttaattcacgtgacgtggtatcaattaaataattaatgcccaatttggatatagcagcctgaagctcatcttgtttagttacggatcctaatgagttattaagcaatatatcgaacggatgaacgaaggttgttttaagttggtcacatactttgtaatctagacatagatgcggaagaacggtagaaactatacgaaataaatattcagagtcctctaattgatcaagagtaactattgacttaataggcatcatttatttagtattaaatgacgaccgtaccagtgacggatatacaaaacgatttaattacagagttttcagaagataattatccatctaacaaaaattatgaaataactcttcgtcaaatgtctattctaactcacgttaacaacgtggtagatagagaacataatgccgccgtagtgtcatctccagaggaaatatcctcacaacttaatgaagatctatttccagatgatgattcaccggccactattatcgaacgagtacaacctcatactactattattgacgatactccacctcctacgtttcgtagagagttattaatatcggaacaacgtcaacaacgagaaaaaagatttaatattacagtatcgaaaaatgctgaagcaataatggaatctagatctatgataacttctatgccaacacaaacaccatccttgggagtagtttatgataaagataaaagaattcagatgttagaggatgaagtggttaatcttagaaatcaacgatctaatacaaaatcatctgataatttagataattttaccaaaatactatttggtaagactccgtacaaatcaacagaagttaataagcgtatagccatcgttaattatgcaaatttgaacgggtcccccttatcagtcgaggacttggatgtttgttcggaggatgaaatagatagaatctataaaacgattaaacaatatcacgaaagtagaaaacgaaaaattatcgtcactaacgtgattattattgtcataaacattatcgagcaggcattgctaaaactcggatttgaagaaatcaaaggactgagtaccgatatcacttcagaaattatcgatgtggagatcggagatgactgcgatgctgtagcatctaaactaggaatcggtaacagtccggttcttaatattgtattgtttatactcaagatattcgttaaacgaattaaaattatttaatttaatacattcccatatccagacaacaatcgtctggattaatctgttcctgtcgtctcataccggacgacatattaatctttttattagtgggcatctttttagatggtttctttttcccagcattaactgagtcgatacctagaagatcgtgattgatctctccgaccattccacgaacttctaattggccgtctctgacggtaccataaactattttaccagcattagtaacagcttggacaatctgaccatccatcgcattgtacgatgtagtagtaactgttgttctacgtctaggagcaccagaagtatttttggagcccttggatgttgatgtagaagaagacgaggattttgattttggtttacatgtaatacattttgaactctttgattttgtatcacatgcgccggcagtcacatctgtttgagaattaagattattgttgcctcctttgacggctgcatctccaccgatttgcgctagtagatttttaagctgtggtgtaatcttattaactgtttcgatataatcatcgtaactgcttctaacggctaaattttttttatccgccatttagaagctaaaaatatttttatttatgcagaagatttaactagattatacaatgaactaatatgatccttttccagattatttacaaacttggtattttttggttctggaggaggcgaatttaaattcggacttggattcggattttgtaagttcttgatcttattatacatcgagtataggatggcgacagtaactgctacacaaataccgatcaaaagaagaataccaatcatttattgacaataacttcactattgatcaagtatgcaatatatcatcttttcactaaataagtagtaataatgattcaacaatgtcgagatatatggacgataataatttagttcatggaaatatcgctatgattggtgtgaatgactccgctaactctgtggggtgcgcagtgctttccccacatagaataaattagcattccgactgtgataataataccaagtataaacgccataatactcaatactttccatgtacgagtgggactggtagacttactaaagtcaataaaggcgaagatacacgaaagaatcaaaagaatgattccagcgattagcacgccggaaaaataatttccaatcataagcatcatgtccatttaactaataaaaattttaaatcgccgaatgaacaaagtggaatataaaccatataaaaacaatagtttgtactgcaaaaataatatctatttttgttttcgaagatatggtaaaattaaatagtagtacacagcatgttataactaacagcagcaacggctcgtaattacttatcatttactagacgaaaaggtggtgggatattttcttgctcaaataatacgaatatatcacccatccattttatgcgatgtttatatactctaatctttaatagatctatagacgacgggtttaccaacaatatagattttatcgattcatctaatttaaacccttccttaaacgtgaatgatctattatctggcataacgatgaccctacctgatgaatcggacaatgtactgggccatgtagaataaattatcaacgaattatcgtctacgaacatttatatcatttgttttaattttaggacgcgaataaatggatataaaatagaaaataacagatattacaaccagtgttatggccgcgcccaaccaggtaggcagttttattttatcttttactacaggttctcctggatgtacgtcaccaacggcggacgtagttctagtacaattagacgtaagttccgcttgggaattttttaacgctaaagagttaacgttaatcgtgcacccaacgtatttacatctagttcgttgaacatcttgattataatataaccattttctatctctagattcgtcagtgcactcatgtaaccaacataccctaggtcctaaatatttatctccggaattagattttggataattcgcgcaccaacaatttctatttcctttatgatcgttacaaaagacgtataatgccgtatccccaaaagtaaaataatcaggacgaataattctaataaactcagaacaatatctcgcatccatatgtttggagcaaatatcggaataagtagacatagccggtttccgttttgcacgtaaccattctaaacaattggggtttccaggatcgtttttacaaaatccagtcatgaaatcatcacaatgttctgtcttgtaattattattaaatatttttggacagtgtttggtatttgtcttagaacaacattttgctacgctatcactatcgcccaggagataatccttttttataaaatgacatcgttgcccggatgctatataatcagtggcgtgttttaaatccttaatatattcaggagttacctcgttctgataatagattaatgatccaggacgaaatttgaaagaactacatggttctccatgaattaatacatattgtttagcaaattcaggaactataaaactactacaatgatctatcgacataccatctatcaaacaaaacttgggtttaatttctcccggagatgtttcataatagtacgtataactttcttctgcaaacttaacagctctattatattcaggataattaaaacctaattccatatatttgtctcgtatatctgctattcctggtgctattttgattctattaagagtaacagctgcccccattcttaataatcgtcagtatttaaactgttaaatgttggtatatcaacatctaccttatttcccgcagtataaggtttgttgcaggtatactgttcaggaatggttacatttatacttcttctatagtcctgtctttcgatgttcatcacatatgcaaagaacagaataaacaaaataatgtaagaaataatattaaatatctgtgaattcgtaaatacattgattgccataataattacagcagctacaatacacacaatagacattcccacagtgttgccattacctccacgatacatttgagttactaagcaataggtaataactaagctagtaagaggcaatagaaaagatgagataaatatcatcaatatagagattagaggagggctatatagagccaagacgaacaaaatcaaaccgagtaacgttctaacatcattatttttgaagattcccaaataatcattcattcctccataatcgttttgcatcatacctccatctttaggcataaacgattgctgctgttcctctgtaaataaatctttatcaagcactccagcacccgcagagaagtcgtcaagcatattgtaatatcttaaataactcatttatatattaaaaaatgtcactattaaagatggagtataatctttatgccgaactaaaaaaaatgacttgtggtcaacccctaagtctttttaacgaagacggggatttcgtagaagttgaaccgggatcatcctttaagtttctgatacctaagggattttacgcctctccttccgtaaagacgagtctagtattcgagacattaacaacgaccgataataaaatcactagtatcaatccaacaaatgcgccaaagttatatcctcttcaacgcaaagtcgtatctgaagtagtttctaatatgaggaaaatgatcgaatcaaaacgtcctctatacattactcttcacttggcgtgtggatttggtaagactattaccacgtgttatcttatggctacacacggtagaaaaaccgtcatttgcgtacccaataaaatgttaatacatcaatggaagacacaggtagaggcagtcggattggaacataagatatccatagatggagtaagtagtctattaaaggaactaaagactcaaagtccggatgtattaatagtagtcagtagacatctgacaaacgatgccttttgtaaatatatcaataagcattatgatttgttcatcttggatgaatcacatacgtataatctgatgaacaatacagcagttacaagatttttagcgtattatcctccgatgatgtgttattttttaactgctacacctagaccatctaaccgaatttattgtaacagtattattaatattgccaagttatccaatctaaaaaaaactatctatgcagtagatagtttttttgagccatattccacagataatattagacatatggtaaaacgactagatggaccatctaataaatatcatatatataccgagaagttattatctgtagacgagcctagaaatcaacttattcttgataccctggtagaagaattcaagtcaggaactattaatcgcattttagttattactaaactacgtgaacatatggtattattctacaaacgattattagattttttcggaccagaggttgtatttataggagacgcccaaaatagacgtactccagatatggtcaaatcaatcaaggaactaaatagatttatattcgtatccaccttattttattccggtactggtttagatattcctagtttggattcgttgttcatttgctcggcagtaatcaacaatatgcaaatagagcaattactagggagggtatgtcgagaaacagaactattagataggacggtatatgtatttcctaacacatccatcaaagaaataaagtacatgataggaaatttcatgcaacgaattattagtctgtctgtagataaactaggatttaaacaaaaaagttatcggaaacatcaagaatccgatcccacttctgcatgtacaacatcatccagagaagaacgtgtattaaatagaatatttaactcgcaaaatcgttaagaagtttaagcgacgatccgcatgctgcgcaggccagtgtattacccctcatagtattaatataatccaatgatacttttgtgatgtcggaaatcttaaccaatttagactgacaggcagaacacgtcatgcaatcatcatcgtcatcgataactgtagtcttgggcttctttttgcgactcttcattccggaacgcacattggtgctatccatttaggtagtaaaaaataagtcagaatatgccctataacacgatcgtgcaaaacctggtatatcgtctctatctttatcacaatatagtgtatcgacatttttattattattgacctcgtttatcttggaacatggaatgggaacatttttgttatcaacggccatctttgccttaattccagatgttgtaaaattataactaaacagtctatcatcgacacaaatgaaattcttgtttagacgtttgtagtttacgtatgcggctcgttcgcgtctcattttttcagatattgcaggtactataatattaaaaataagaatgaaataacataggattaaaaataaagttatcatgacttctagcgctgatttaactaacttaaaagaattacttagtctgtacaaaagtttgagattttcagattctgcggctatagaaaagtataattctttggtagaatggggaacatctacttactggaaaataggcgtgcaaaaggtagctaatgtcgagacgtcaatatctgattattatgatgaggtaaaaaataaaccgtttaatattgatccgggctattacattttcttaccggtatattttgggagcgtctttatttattcgaagggtaaaaatatggtagaacttggatctggaaactcttttcaaataccagatgatatgcgaagtgcgtgtaacaaagtattagacagcgataacggaatagactttctgagatttgttttgttaaacaatagatggataatggaagatgctatatcaaaatatcagtctccagttaatatatttaaactagctagtgagtacggattaaacatacccaaatatttagaaattgaaatagaggaagacacattatttgacgacgagttatactctattatagaacgctctttcgatgataaatttccaaaaatatccatatcgtatattaagttgggagaacttagacggcaagttgtagactttttcaaattctcattcatgtatattgagtccatcaaggtagatcgtataggagataatatttttattcctagcgttataacaaaatcaggaaaaaagatattagtaaaagatgtagaccatttaatacgatccaaggttagagaacatacatttgtaaaagtaaaaaagaaaaacacattttccattttatacgactatgatggaaacggaacagaaactagaggagaagtaataaaacgaattatagacactataggacgagactattatgttaacggaaagtatttctctaaggttggtagtgcaggcttaaagcaattgactaataaattagatattaatgagtgcgcaactgtcgatgagttagttgatgagattaataaatccggaactgtaaaacgaaaaataaaaaaccaatcagcatttgatttaagcagagaatgtttgggatatccagaagcggattttataacgttagttaataacatgcggttcaaaatagaaaattgtaaggttgtaaatttcaatattgaaaatactaattgtttaaataacccgagtattgaaactatatatggaaactttaaccagttcgtctcaatctttaatgtcgtcaccgatgtcaaaaaaagattattcgagtgaaataatatgcgcctttgatataggtgcaaaaaatcctgccagaactgttttagaagtcaaggataactccgttagggtattggatatatcaaaattagactggagttctgattgggaaaggcgcatagctaaagatttgtcacaatatgaatacactacagttcttctagaacgtcagcctagaaggtcgccgtatgttaaatttatctattttattaaaggctttttatatcatacatcggctgccaaagttatttgcgtctcgcctgtcatgtctggtaattcatatagagatcgaaaaaagagatcggtcgaagcatttcttgattggatggacacattcggattgcgagactccgttccggatagacgcaaattagacgatgtagcggatagtttcaatttggctatgagatacgtattagataaatggaatactaattatacaccttataataggtgtaaatctagaaattacataaaaaaaatgtaataacgttagtaacgccattatggataatctatttacctttctacatgaaatagaagatagatatgccagaactatttttaactttcatctaataagttgcgatgaaataggagatatatatggtcttatgaaagaacgcatttcctcagaggatatgtttgataatatagtgtataataaagatatacatcctgccattaagaaactagtgtattgcgacatccaacttactaaacacattattaatcagaatacgtatccggtatttaacgattcttcacaagtgaaatgttgtcattatttcgacataaactcagataatagcaatattagctctcgtacagtagagatatttgagagggaaaagtcatctcttgtatcatatattaaaactaccaataagaagagaaaggtcaattacggcgaaataaagaaaactgttcatggaggcactaatgcaaattacttttccggtaaaaagtctgacgagtatctgagtactacagttagatccaacattaatcaaccttggatcaaaaccatttctaagagaatgagagtagatatcattaatcactctatagtaacgcgtggaaaaagctctatattacaaactatagaaattatttttactaatagaacatgtgtgaaaatattcaaggattctactatgcacattattctatccaaggacaaggatgaaaaggggtgtatacacatgattgacaaattattctatgtctattataatttatttctgttgttcgaagatatcatccaaaacgagtactttaaagaagtagctaatgttgtaaaccacgtactcacggctacggcattagatgagaaattattcctaattaagaaaatggctgaacacgatgtttatggagttagcaatttcaaaatagggatgtttaacctgacatttattaagtcgttggatcataccgttttcccctctctgttagatgaggatagcaaaataaagttttttaaggggaaaaagctcaatattgtagcattacgatctctggaggattgtataaattacgtgactaaatccgagaatatgatagaaatgatgaaggaaagatcgactattttaaatagcatagatatagaaacggaatcggtagatcgtctaaaagaattgcttctaaaatgaaaaaaaacactgattcagaaatggatcaacgactcggatataagtttttggtgcctgatcctaaagccggagttttttatagaccgttacatttccaatatgtatcgtattctaattttatattgcatcgattgcatgaaatcttgaccgtcaagcggccactcttatcgtttaagaataatacagaacgaattatgatagaaattagcaatgttaaagtgactcctccagattactcacctataatcgcgagtattaaaggtaagagttatgacgcattagccacgttcactgtaaatatctttaaagaggtaatgaccaaagagggtatatccatcactaaaataagtagttatgagggaaaagattctcatttgataaaaattccgctactaataggatacgggaataaaaatccacttgatacagccaagtatcttgttcctaatgtcataggtggagtctttatcaataaacaatctgtcgaaaaagtaggaattaatctagtagaaaagattacaacatggccaaaatttagggttgttaagccaaactcattcactttctcgttttcctccgtatcccctcctaatgtattaccgacaagatatcgccattacaagatatctctggatatatcacaattggaagcgttgaatatatcatcgacaaagacatttataacggtcaatattgttttgctgtctcaatatttatctagagtgagtctagaattcattagacgtagtttatcatacgatatgcctccagaagttgtctatctagtaaacgcgataatagatagtgctaaacgaattactgaatctattactgactttaatattgatacatacattaatgacctggtggaagctgaacacattaaacaaaaatctcagttaacgattaacgagttcaaatatgaaatgctgcataactttttacctcatatgaactatacacccgatcaactaaagggattttatatgatatctttactaagaaagtttctctactgtatcttccacacttctagatatccagatagagattcgatggtttgtcatcgcatcctaacgtacggcaaatattttgagacgttggcacatgatgaattagagaattacataggcaacatccgaaacgatatcatgaacaatcacaagaacagaggcacttacgcggtaaacattcatgtactaacaactcccggacttaatcacgcgttttctagcttattgagtggaaagttcaaaaagtcagacggtagttatcgaacacatcctcactattcatggatgcagaatatttctattcctaggagtgttggattttatccggatcaagtaaagatttcaaagatgttttctgtcagaaaataccatccaagtcaatatctttacttttgttcatcagacgttccggaaagaggtcctcaggtaggtttagtatctcaattgtctgtcttgagttccattacaaatatactaacgtctgagtatttggatttggaaaagaaaatttgtgagtatatcagatcatattataaagatgatataagttactttgaaacaggatttccaatcactatagaaaatgctctagtcgcatctcttaatccaaatatgatatgtgattttgtaactgactttagacgtagaaaacggatgggattcttcggtaacttggaggtaggtattactttagttagggatcacatgaatgaaattcgcattaatattggagcgggaagattagtcagaccattcttggttgtggataacggagagctcatgatggatgtgtgtccggagttagaaagcagattagacgacatgacattctctgacattcagaaagagtttccgcatgtcatcgaaatggtagatatagaacaatttacttttagtaacgtatgtgaatcggttcaaaaatttagaatgatgtcaaaggatgaaagaaagcaatacgatttatgtgactttcctgccgaatttagagatggatatgtagcatcttcactagtgggaatcaatcacaattctggacccagagctattcttggatgtgctcaagctaaacaagctatctcttgtctgagttcggatatacgaaataaaatagacaatggaattcatttgatgtatccagagaggccaattgtcattagtaaggctttagaaacttcaaagattgcggctaattgcttcggacaacatgttactatagcattaatgtcgtacaaaggtatcaatcaagaggatggaattatcatcaaaaaacaatttattcagagaggcggtctcgatatagttaccgcaaagaaacatcaagtagaaattccgttggaaaactttaataacaaagaaagagataggtctaacgcctattcaaaattagaaagtaatggattagttagactgaatgctttcttggaatccggagacgctatggcacgaaatatctcatcaagaactcttgaagatgattttgctagagataatcagattagcttcgatgtttccgagaaatataccgatatgtacaaatctcgcgttgaacgagtacaagtagaacttactgacaaagttaaggtacgagtattaaccatgaaagaaagaagacccattctaggagacaaatttaccactagaacgagtcaaaagggaacagtcgcgtatgtcgcggatgaaacggaacttccatacgacgaaaatggtatcacaccagatgtcattattaattctacatccatcttctctagaaaaactatatctatgttgatagaggttattttaacagccgcatattctgctaagccgtacaacaataagggagaaaaccgacctgtctgttttcctagtagtaacgaaacatccatcgatacatatatgcaattcgctaaacaatgttatgagcattcaaatccgaaattgtctgatgaagaattatcggataaaatcttttgtgaaaagattctctatgatcctgaaacggataagccttatgcatccaaagtattttttggaccaatttattacttgcgtctgagacatttaactcaggacaaggcaaccgttagatgtagaggtaaaaagacgaagctcattagacaggcgaatgagggacgaaaacgtggaggaggtatcaagttcggagaaatggagagagactgtttaatagcgcatggtgcagccaatactattacagaagttttgaaagattcggaagaagattatcaagatgtgtatgtttgtgaaaattgtggagacatagcagcacaaatcaagggtattaatacatgtcttagatgttcaaaacttaatctctctcctctcttaacaaaaattgataccacgcacgtatctaaagtatttcttactcaaatgaacgccagaggcgtaaaagtcaaattagatttcgaacgaagacctccttcgttttataaaccattagataaagttgatctcaagccgtcttttctggtgtaatattctagtttggtagtagatacatatcaatatcatcaaattcgagatccgaattataaaatgggcgtggattgttaactatagaatcggacgtctgatattcgaaaatctgtggagtttcaggttttggtggaggtgtaactgctacttgggatactgaagtctgatattcagaaagctgggggatgttctggttcgacatccaccgatggtgttacaccactactaatcggttcggtaacgtctgtggacgatggaggcaccacttctacagaacctgtagcctcagttgtcaacggagatacatttttaatgcgagaaaatgtataatttggtaatggtttctcatgtggatctgaagaagaggtaagatatctactagaaagataccgatcacgttctagttctcttttgtagaacttaactttttctttctcagcatctagttgatattccaacctcttcacgttactacgttcagattccaattcacgttcgcatgggttacctccgcagtttttacgagcgatttcacgttcagccttcatgcgtctctccctctctttatcgagtttatcagagcagtctttctgaaggcgatcgaactccataaatttctccaacgctttgattgtttccatagatttccgaagttcagcttttaggactgtgattctttttctttcgaattcacagctggatgtacaaccgtttccattaccgccatctctaagtttcttttctagatcggcaacatttcatccccatgccttttacattcctcgagtctactgtcgtcgaaatatcgttccagctccttttcgacatcaataactttagcacgttgtctctcaagctctcttttgtagttatctgattccctggcacgtttaagatcttcatgcaattgagtcagctcttaacttcctctcttgcttcttcgtcatagtacgcgcaatcactgtgagatccattgttaccacgtctacactcggcgagctcgcgtttaagagattcaatttcccgtttgtattggtccatgtttccattgctaccaccattagatttacaggctgctagttgtcgttcgagatcagaaatacgggttttcttggaattgatttcgtcgatgtacttggcatcgaaacacttattaagttctttttccaattctacgattttatttctttcgcgagtcaattccctcctgtagtaactatctgttttgtcagattcacgctctctacgtagactttcttgcaagttactaatttgttccctagcacgtccgagtttagttttatatgctgaatagagttctgattcatcctttgagcagatctctagcgatcgtttaagattcctaattctagtctttagcctatttacctcctcagaagatgttccgttaccgttgcgtttacactcgttaagctgtctatcaagatccatgattctatctctaagacgttgcatctctctttccatatcagcattgctttcattattacgtctgcagtcactcaactgtctttcaatatctgagattctatctctaagacgtcgcatctctctctgtttcggcattggtttcattattacgtttacagtcgttcaactgtctttcaagatctgatattctagattggagtctgctaatctctgtagcattttcacggcattcactcagttgtctttcaagatctgaaattttagattggagtctgctaatctctgtaagatttcctcctccgctctcgatgcagtcggtcaacttattctctagttctctaatacgcgaacgcagtgcatcaacttcttgcgtgtcttcctggttgcgtgtacattcatcgagtctagattcgagatctctaacgcgtcgtcgttcttcctcaagttctctgcgtactacagaaagcgtgtccttatcttgttgatatttagcaatttctgattctagagtactgattttgcttacgtagttactaatatttgtcttggccttatcaagatcctccttgtatttgtcgcattccttgatatccctacgaagtctggacagttcccattcgacattacgacgtttatcgatttcagctcggagatcgtcatcgcgttgttttagccacatacgactgagttcaagttctcgttgacaagatccatctacttttccattcctaatagtatccagttccttttctagttctgaacgcatttctcgttccctatcaagcgattctctcaattctcggatagtcttcttatcaatttctaataaatctgaaccatcatctgtcccattttgaatatccctgtgttctttgatctcttttgtaagtcggtcgattctttcggttttataaacagaatccctttccaaagtcctaatcttactgagtttatcactaagttctgcattcaattcggtgagttttctcttggcttcttccaactctgttttaaactctccactatttccgcattcttcctcgcatttatctaaccattcaattagtttattaataactagttggtaatcagcgattcctatagccgttcttgtaattgtgggaacataattaggatcttctaatggattgtatggcttgatagcatcatctttatcattattagggggatggacaaccttaattggttggtcctcatctcctccagtagcgtgtggttcttcaataccagtgttagtaataggcttaggcaaatgcttgtcgtacgcgggcacttcctcatccatcaagtatttataatcgggttctacttcagaatattcttttctaagagacgcgacttcgggagttagtagaagaactctgtttctgtatctatcaacgctggaatcaatactcaagttaaggatagcgaatacctcatcgtcatcatccgtatcttctgaaacaccatcatatgacatttcatgaagtctaacgtattgataaatagaatcagatttagtattaaacagatccttaacctttttagtaaacgcatatgtatattttagatctccagatttcataatatgatcacatgccttaaatgtcagtgcttccatgatataatctggaacactaatgggtgacgaaaaagatacagcaccatatgctacgttgataaataaatctgaaccactaagtagataatgattaatgttaagaaagaggaaatattcagtgtataggtatgtcttggcgtcatatcttgtactaaacacgctaaacagtttgttaatgtgatcaatttccaatagattaattagagcagcgggaataccaacaaacatattaccacatccgtattttctatgaatatcacatatcatgttaaaaaatcttgatagaagagcgaatatctcgtctgacttaatgagtcgtagttcagcagcaacataagtcataactgtaaatagaacatactttcctgtagtgttgattctagactccacatcaacaccattattaaaaatagttttatatacatctttaatctgctctccgttaatcgtcgaacgttctagtatacggaaacactttgatttcttatctgtagttaatgacttagtgatatcacgaagaatattacgaattacatttcttgtttttcttgagagacctgattcagaactcaactcatcgttccatagtttttctacctcagtggcgaaatctttggagtgcttggtacatttttcaataaggttcgtgacctccatttattataaaaaatttattcaaaacttaactacaatcgggtaattataaaatcgtagatctcccatgtggcggaatactaccatctatcgcatgtggatggacagtaggtaatggccatgggaacagtaatgtttgcatatttatctttcttgccagtattactgcatattgtcccaatgtttcgatgtgatgttctaacctatcaactgccgctgtatcacaacaatagtgtccgatgaaattaagattatgatccaatgtgtttaatatatgattatcaagtcttatacgatccgcgtcttttttgacaggatcaggttcttctacaggaagaagtttcggcctcttatgatattcatgtctgggaaacggtggtctagggtgaggctccggtatcggagtgggttttggattataatcatcatcgtctatgacatcatcttcgacttcgatatttattttgctatcttgatgatgtcctgtatcagttgcattttcagcactcgactgaatattagcgcattcattgtctattattaccatatttctaaacccaaaatgtatgtgttgaacatcagtactatcgttgatgagtcttatagcatgaattcgcttatcgttatcgggtttatcttctgtcaccttagcaattccttttttattaaactctacataatcatatccatttctattgtttgttctaatataaacgagtatagcatcattgctaaatttttcaatagtatcaaaaacagaatatcctaaaccatataatatatattcaggaacactcaaactaaatgtccaggattctcctaaatacgtaaactttaatagtgcgaaatcattcaaaaatctaccacttatagatagatagtacataaatgcgtatagtagtctacctatctctttattatgaaaaccggcattacgatcatatatgtcgtgatatacctgtgatccgtttacgttaaaccataaatacatgggtgatcctataaacatgaatttatttctaattctcagagctatagttaattgaccgtgtaatatttgcttacatgcatacttgatacgcttattaataagatttttatcattgctcgttatttcagaatcgtatatataaggagtaccatcgtgattcttaccagatattatacaaaatactatatataaaatatattgacccacgttagtaatcatataaatgtttaacgttttaaattttgtattcaatgatccattatcatacgctatcatggtcttgtaatattcattctttaaaatataatattgtgttagccattgcattggagctcctaatggagattttctattctcatccattttaggataggctttcataaagtccctaataacttcgtgaataatgtttctatgttttctactgatgcatgtatttgcttcgatttttttatcccatgtttcatctatcatagatttaaacgcagtaatgctcgcaacattaacatcttgaaccgttggtacaattccgttccataaatttataatgttcgccatttatataactcattttttgaatatacttttaattaacaaaagagttaagttactcatatggacgccgtccagtctgaacatcaatctttttagccagagatatcatagccgctcttagagtttcagcgtgattttccaacctaaatagaacttcatcgttgcgtttacaacacttttctatttgttcaaactttgttgttacattagtaatctttttttccaaattagttagccgttgtttgagagtttcctcattgtcgtcttcatcggctttaacaattgcttcgcgtttagcctctggctttttagcagcctttgtagaaaaaaattcagttgctggaattgcaagatcgtcatctccggggaaaagagttccgtccatttaaagtacagattttagaaactgacactctgcgttatttatatttggtacaacacatggattataaatattgatgttaataacatcagaaaatgtaaagtctatacattgttgcatcgtgttaaattttctaatggatctagtattattgggtccaacttctgcctgaaatccaaatatggaagcggatacaaaaccgtttcctggataaaccacacatctccacttttgctttacatcagaaattgtgtcgttgacatcttgaactctcctatctaatgccggtgttccacctatagattttgaatattcgaatgctgcatgagtagcattaaattccttaatattgccataattttcatatattgagtaaccctggataaaaagtaaacacaccgcagccgtcgctaccacaataaaaaaaattgatagagagttcatttataatctattagaagctgacaaaatttttttacacgcatcagacaatgctttaataaatagttcaacatctacttttgtcatatcgaaccgatggtatgattctaacctagaattacatccgaaaaagttgactatgttcatagtcattaagtcattaacaaacaacattccagactctggattataagacgatactgtttcgtcacaattacctaccttaatcatgtgattatgaatattggctattagagcaccttctaagaaatctataatatctttgaaacacgatttaaaatcaaaccacgaatatacttctacgaagaaagttagtttacccataggagaaataactataaatggagatctaaatacaaaatccggatctatgatagttttaacattattatattctctattaaatacctccacatctaaaaatgttaattttgaaactatgtcttcgtttattaccgtacctgaactaaacgctataagctctattgtttgagaactctttaaacgatattcttgaaatacatgtaacaaagtttcctttaactcggtcggtttatctaccatagttacagaatttgtatccttatctataatataataatcaaaatcgtataaagttatataattatcgcgttcagattgggatcttttcaaatagactaaaaaccccatttctctagtaagtatcttatgtatatgtttgtaaaatatcttcatggtgggaatatgctctaccgcagttagccattcctcattgacagcggtagatgtattagacaaaactattccaatgtttaacaagggccattttacgagattattaaatccttgtttgataaatgtagccaatgagggttcgagttcaacgacgattgaattctcttcccgcggatgctgcatgatgaacgacgggatgttgttcgattgatttggaattctttttcgactttttgtttatattaaatattttaaaatttatagcggatagcaattcatgtaccacggataatgtagacgcgtattgcgcatcgatatctttattattagataaatttatcaataaatgtgagaagtttgcctcgttaaggtcttccatttaaatattatataaacatttgtgtttgtaacttattcgtcttttatggaatagttttttactagtaaagctgcaattacacactttgtccgtaaaacataaatataaacaccagcttttatcaatcgttccaaaaagtcgacggcggacatttttaacatggcatctattttaaatacacttaggtttttggaaaaaacatcattttataattgtaacgattcaataactaaagaaaagattaagattaaacataagggaatgtcatttgtattttataagccaaagcattctaccgttgttaaatacttgtctggaggaggtatatatcatgatgatttggttgtattggggaaggtaacaattaataatctaaagatgatgctattttacatggatttatcatatcatggagtgacaagtagtggagcaatttacaaattgggatcgtctatcgatagactttctctaaataggactattgttacaaaagttaataattatgatgatacattttttgacgacgatgattgatcgctattgcacaattttgtttttgtactttctaatatagtgtttaggttctttttcatatgagaatattgatttactaaaatatctatgtttaacttttgttctatgacgtccttatcggcggtatcggtacatatacgtaattcaccttcacaaaatacggagtcttcgataataatagccaatcgattattggatctagctgtctgtatcatattcaacatgtttaatatatcctttcgtttcccctttacaggcatcgatcgtagcatattttccgcgtctgatatggaaatgttaaaactacaaaaatgcgtaatgttagcccgtcctaatattggtacgtgtctataagtttggcatagtagaataatagacgtgtttaaatgccttccaaagtttaagaattctattagagtattgcattttgatagtttatcgcctacatcatcaaaaataagtaaaaagtgtgctgattttttatgattttgtgcgacagcaatacatttttctatgttacttttagttcgtatcagattatattctagagattcctgactactaacgaaattaatatgatttggccaaatgtatccatcataatctgggttataaacgggtgtaaacaagaatatatgtttatattttttaactagtgtagaaaacagagatagtaaatagatagtttttccagatccagatcctcctgttaaaaccattctaaacggcatttttaataaattttctcttgaaaattgtttttcttggaaacaattcataattatatttacagttactaaattaatttgataataaatcaaaatatggaaaactaaggttgttagtagggaggagaacaaagaaggcacatcgtgatataaataacatttattatcatgatgacaccagaaaacgacgaagagcagacatctgtgttctccgctactgtttacggagacaaaattcagggaaagaataaacgcaaacgcgtgattggtctatgtattagaatatctatggttatttcactactatctatgattaccatgtccgcgtttctcatagtgcgcctaaatcaatgcatgtctgctaacgaggctgctattactgacgccgctgttgccgttgctgctgcatcatctactcatagaaaggttgcgtctagcactacacaatatgatcacaaagaaagctgtaatggtttatattaccagggttcttgttatatattacattcagactaccagttattctcggatgctaaagcaaattgcactgcggaatcatcaacactacccaataaatccgatgtcttgactacctggctcattgattatgttgaggatacatggggatctgatggtaatccaattacaaaaactacatccgattatcaagattctgatgtatcacaagaagttagaaagtatttttgtgttaaaacaatgaactaatatttatttttgtacattaataaatgaaatcgcttaatagacaaactgtaagtaggtttaagaagttgtcggtgccggccgctataatgatgatactctcaaccattattagtggcataggaacatttctgcattacaaagaagaactgatgcctagtgcttgcgccaatggatggatacaatacgataaacattgttatttagatactaacattaaaatgtctacagataatgcggtttatcagtgtcgtaaattacgagctagattgcctagacctgatactagacatctgagagtattgtttagtattttttataaagattattgggtaagtttaaaaaagaccaatgataaatggttagatattaataatgataaagatatagatattagtaaattaacaaattttaaacaactaaacagtacgacggatgctgaagcgtgttatatatacaagtctggaaaactggttaaaacagtatgtaaaagtactcaatctgtactatgtgttaaaaaattctacaagtgacaacaaaaaatgaattaataataagtcgttaacgtacgccgccatggacgccgcgtttgttattactccaatgggtgtgttgactataacagatacattgtatgatgatctcgatatctcaatcatggactttataggaccatacattataggtaacataaaaactgtccaaatagatgtacgggatataaaatattccgacatgcaaaaatgctactttagctataagggtaaaatagttcctcaggattctaatgatttggctagattcaacatttatagcatttgtgccgcatacagatcaaaaaataccatcatcatagcatgcgactatgatatcatgttagatatagaagataaacatcagccattttatctattcccatctattgatgtttttaacgctacaatcatagaagcgtataacctgtatacagctggagattatcatctaatcatcaatccttcagataatctgaaaatgaaattgtcgtttaattcttcattctgcatatcagacggcaatggatggatcataattgatgggaaatgcaatagtaattttttatcataaaagttgtaaagtaaataataaaacaataaatattgaactagtagtacgtatattgagcaatcagaaatgatgctggtacctcttatcacggtgaccgtagttgcgggaacaatattagtatgttatatattatatatttgtaggaaaaagatacgtactgtctataatgacaataaaattatcatgacaaaattaaaaaagataaagagttctaattccagcaaatctagtaaatcaactgatagcgaatcagactgggaggatcactgtagtgctatggaacaaaacaatgacgtagataatatttctaggaatgagatattggacgatgatagcttcgctggtagtttaatatgggataacgaatccaatgttatggcgcctagcacagaacacatttacgatagtgttgctggaagcacgctgctaataaataatgatcgtaatgaacagactatttatcagaacactacagtagtaattaatgaaacggagactgttgaagtacttaatgaagataccaaacagaatcctaactattcatccaatcctttcgtaaattataataaaaccagtatttgtagcaagtcaaatccgtttattacagaacttaacaataaatttagtgagaataatccgtttagacgagcacatagcgatgattatcttaataagcaagaacaagatcatgaacacgatgatatagaatcatcggtcgtatcattggtgtgattagtttcctttttataaaattgaagtaatatttagtattattgctgccgtcacgttgtacaaatggagatattccctgtattcggcatttctaaaattagcaattttattgctaataatgactgtagatattatatagatacagaacatcaaaaaattatatctgatgagatcaatagacagatggatgaaacggtacttcttaccaacatcttaagcgtagaagttgtaaatgacaatgagatgtaccatcttattcctcatagattatcgacgattatactctgtattagttctgtcggaggatgtgttatctctatagataatgacatcaatggcaaaaatattctaacctttcccattgatcatgctgtaatcatatccccactgagtaaatgtgtcgtagttagcaagggtcctacaaccatattggttgttaaagcggatatacctagcaaacgattggtaacatcgtttacaaacgacatactatatgtaaacaatctgtcactgattaattatttgccgttgtctgtattcattattagacgagtcaccgactatttggatagacacatatgcgatcagatatttgctaataataagtggtattcccttataaccatcgacgataagcaatatcctattccatcaaactgtataggtatgtcctctgccaagtacataaattctagcatcgagcaagatactttaatccatgtttgtaacctcgagcatccgttcgactcagtatacaaaaaaatgcagtcgtacaattctctacctatcaaggaacaaatattgtacggtagaattgataatataaatatgagcattagtatttctgtggattaatagatttctagtatggggatcattaatcatctctaatctctaaatacctcataaaacgaaaaaaaagctattatcaaatactgtacggaatggattcattctcttctctttttatgaaactctgttgtatatctactgataaaactggaagcaaaaaatctgatagaaagaataagaataagatcaaggattatatggaacacgattattataaaataacaatagttcctggttcctcttccacgtctactagctcgtggtattatacacatgcctagtaatagtctctttgcgttgacggaaagcagactagaaataacaggctaaaatgttcagacaccataatagttcccaacccagataataacagagttccatcaacacattcctttaaactcaatcccaaacccaaaaccgttaaaatgtatccggccaattgatagtagataatgaggtgtacagcgcatgataatttacacagtaaccaaaatgaaaatactttagtaattataagaaatatagacggtaatgtcatcatcaacaatccgataatatgcctgagagtaaacattgacggataaaacaaaaatgctccgcataactctatcatggcaataacacaaccaaatacttgtaagattcctaaattagtagaaaatacaacgaatatcgatgtataagtgatctcgagaaataataagaataaagtaatgcccgtaaagataaacatcaacattgtttggtaatcattaaaccaattagtatgaagttgaactaatttcacagtagattttattccagtgttatcctcgcatgtataagtacctggtaagatatctttatattccataatcaatgagacatcactatctgataacgaatgaagtctagcactagtatgccatttacttaatattgtcgtcttggaagttttattataagttaaaatatcatggttatccaatttccatctaatatactttgtcggattatctatagtacacggaataatgatggtatcattacatgctgtatactctatggtctttgtagttgttataacaaccaacgtatagaggtatatcaacgatattctaactcttgacattttttatttatttaaaatgatacctttgttatttattttattctattttgctaacggtattgaatggcataagtttgaaacgagtgaagaaataatttctacttacttattagacgacgtattatacacgggtgttaatggggcggtatacacattttcaaataataaactaaacaaaactggtttaactaataataattatataacaacatctataaaagtagaggatgcggataaggatacattagtatgcggaaccaataacggaaatcccaaatgttggaaaatagacggttcagacgacccaaaacatagaggtagaggatacgctccttatcaaaatagcaaagtaacgataatcagtcacaacggatgtgtactatctgacataaacatatcaaaagaaggaattaaacgatggagaagatttgacggaccatgtggttatgatttattcacggcggataacgtaattccaaaagatggtttacgaggagcattcgtcgataaagacggtacttatgacaaagtttacattcttttcactgatactatcggctcaaagagaattgtcaaaattccgtatatagcacaaatgtgcctaaacgacgaaggtggtccatcatcattgtctagtcatagatggtcgacgtttctcaaagtcgaattagaatgtgatatcgacggaagaagttatagacaaattattcattctagaactataaaaacagataatgatacgatactatatgtattcttcgatagtccttattccaagtccgcattatgtacctattctatgaataccattaaacaatctttttctacgtcaaaattggaaggatatacaaagcaattgccgtctccagctcctggtatatgtttaccagctggaaaagttgttccacataccacgtttgaagtcatagaacaatataatgtactagatgatattataaagcctttatctaaccaacctatcttcgaaggaccgtctggtgttaaatggttcgatataaaggagaaggaaaatgaacatcgggaatatagaatatacttcataaaagaaaattctatatattcgttcgatacaaaatctaaacaaactcgtagctcgcaagtcgatgcgcgactattttcagtaatggtaactgcgaaaccgttatttatagcagatatagggataggagtaggaatgccacaaatgaaaaaaatacttaaaatgtaatcttaatcgagtacaccacacgacaatgaacaaacataagacagattatgctggttatgcttgctgcgtaatatgcggtctaattgtcggaattatttttacagcgacactattaaaagttgtagaacgtaaattagttcatacaccattaatagataaaacgataaaagatgcatatattagagaagattgtcctactgactggataagctataataataaatgtatccatttatctactgatcgaaaaacctgggaggaaggacgtaatgcatgcaaagctctaaattcaaattcggatctaattaagatagagactccaaacgagttaagttttttaagaagccttagacgaggctattgggtaggagaatccgaaatattaaaccagacaaccccatataattttatagctaagaatgccacgaagaatggaactaaaaaacggaaatatatttgtagcacaacgaatactcccaaactgcattcgtgttacactatataacaattacactacatttttatcataccactacttcggttagatgttttagaaaaaaataaatatcgccgtaccgttcttgtttttataaaaataacaattaacaattatcaaattttttctttaatattttacgtggttgaccattcttggtggtaaaataatctcttagtgttggaatggaatgctgtttaatgtttccacactcatcgtatattttgacgtatgtagtcacatcgtttacgcaatagtcagactgtagttctatcatgcttcctacatcagaaggaggaacagttttaaagtctcttggttttaatctattaccgttagttttcatgaaatcctttgttttatccacttcacattttaaataaatgtccactatacattcttttgttaattttactagatcgtcatgggtcatagaatttataggttccgtagtccatggatccaaactagcaaacttcgcgtatacggtatcgcgattagtgtatacaccaactgtatgaaaattaagaaaacagtttaataaatcaacagaaatatttaatcctccgtttgatacagatgcgccatatttatggatttcggattcacacgttgtttgtctgaggtgttcgtctagtgttgcttctacgtaaacttcgattcccatatattctttattgtcagaatcgcataccgatttatcatcatacactgtttgaaaactaaatggtatacacatcaaaataataaataataacgagtacattctgcaatattgttatcgtaattggaaaattagtgttcgagtgagttggattatgtgagtattggattgtatattttattttatattttgtaataagaataaaatgctaatgtcaagtcttattaaaaacatatataataaataacaatggctgaatggcataaaataataagttcgaggatgccgccatcgttgattacaagactacaaagaatgttctagctgctattcctaacagaacatttgccaagattaatccgggtgaaattattcctctcatcactaatcgtaatattctaaaacctcttattggtcagaaatattgtattgtatatactaactctctaatggatgagaacacgtatgctatggagttgcttactgggtacgcccctgtatctccgatcgttatagcgagaactcataccgcacttatatttttgatgggtaagccaacaacatccagacgtgacgtgtatagaacgtgtagagatcacgctacccgtgtacgcgcaactggtaattaaaataaaaagtaatattcatatgtagtgtcaattttaaatgatgatgaaatggataatatccatattgacgatgtcaataatgccggtattggcatacagctcatcgatttttagatttcattcagaggatgtggaattatgttatgggcatttgtattttgataggatctataatgtagtaaatataaaatataatccgcatattccatatagatataattttattaatcgcacgttaaccgtagatgaactagacgataatgtcttttttacacatggttattttttaaaacacaaatatggttcacttaatcctagtttgattgtctcattatcaggaaacttaaaatataatgatatacaatgctcagtaaatgtatcgtgtctcattaaaaatttggcaacgagtacatctactatattaacatctaaacataagacttattctctacatcggtccacgtgtattactataataggatacgattctattatatggtataaagatataaatgacaagtataatgacatctatgattttactgcaatatgtatgctaatagcgtctacattgatagtgaccatatacgtgtttaaaaaaataaaaatgaactcttaattatgctatgctattagaaatggataaaatcaaaattacggttgattcaaaaattggtaatgttgttaccatatcgtataacttggaaaagataactattgatgtcacacctaaaaagaaaaaagaaaaggatgtattattagcgcaatcagttgctgtcgaagaggcaaaagatgtcaaggtagaagaaaaaaatattatcgatattgaagatgacgatgatatggatgtagaaagcgcataatactatctataaaaataagtatataataaatactttttatttacggtactcttgtagtggtgataccctactcgattatttttttaaaaaaaaaatacttattctgattcttctaaccatttccgtgttcgtttgaatgccacatcgacgtcaaagataggggagtagttgaaatctagttctgcattgttggtacgcacctcaaatgtagtgttggatatcttcaacgtatagttgttgagtagtgatggttttctaaatagaattctcttcatatcattcttgcacgcgtacatttttagcatccatcttggaatcctagatccttgttctattcccaatggtttcatcaatagaagattaaacatatcgtacgaacacgatggagagtaatcgtagcaaaagtaagcatttcctttaatcttagatcccggatactggatatattttgcagccaacacgtgcatccatgcaacatttcctacatatacccggctatgcaccgcgtcatcatcgactgtacgatacataatgttaccgtgttgcttacattgctcgtaaaagactttcgtcaatttgtctccttctccgtaaattctagtgggtcttaggcaacaagtatacaattttgctccattcatgattacggaattattggctttcataaccagttgctcggccatacgtttactttttgcgtatacatgtcctggtgatatatcataaagggtatgctcatggccgatgaatggatcaccgtgtttattgggtcctattgcttccatgctactagtatagatcaaatacttgattcctaggtccacacaagctgccaaaatagtctgtgttccataatagtttactttcatgatttcattatcggtgtattttccaaatacatccactagagcagccgtatgaataatcagatttaccccatctagcgcttctctcaccttatcaaagtcgtttatatcacattgtatatagtttataaccttaactttcgaggttattggttgtggatcttctacaatatctatgactctgatttcttgaacatcatctgcactaattaacagttttactatatacctgcctagaaatccggcaccaccagtaaccgcgtacacggccattgctgccactcataatatcagactacttattctattttactaaataatggctgtttgtataatagaccacgataatatcagaggagttatttactttgaaccagtccatggaaaagataaagttttaggatcagttattggattaaaatccggaacgtatagtttaataattcatcgttacggagatattagtcaaggatgtgattccataggcagtccagaaatatttatcggtaacatctttgtaaacagatatggtgtagcatatgtttatttagatacagatgtaaatatatctacaattattggaaaggcgttatctatttcaaaaaatgatcagagattagcgtgtggagttattggtatttcttacataaatgaaaagataatacattttcttacaattaacgagaatggcgtttgatatatcagttaatgcgtctaaaacaataaatgcattagtttacttttctactcagcaaaataaattagtcatacgtaatgaagttaatgatacacactacactgtcgaatttgatagggacaaagtagttgacacgtttatttcatataatagacataatgacaccatagagataagaggggtgcttccagaggaaactaatattggttgcgcggttaatacgccggttagtatgacttacttgtataataagtatagttttaaactgattttagcagaatatataagacacagaaatactatatccggcaatatttattcggcattgatgacactagatgatttggctattaaacagtatggagacattgatctattatttaatgagaaacttaaagtagactccgattcgggactatttgactttgtcaactttgtaaaggatatgatatgttgtgattctagaatagtagtagctctatctagtctagtatctaaacattgggaattgacaaataaaaaatataggtgtatggcattagccgaacatatatctgatagtattccaatatctgagctatctagactacgatacaatctatgtaagtatctacgcggacacactgagagcatagaggataaatttgattattttgaagacgatgattcgtctacatgttctgccgtaaccgacagggaaacggatgtataattttttttatagcgtgaaggatatgataaaaaatataattgttgtatttatcccattccaatcaccttatatgattctgtaacacaataaaggagtcttatagatgtatagaggtcagatactggtttgataaactgtttattccacataagtatgtttgactttatggttagacccgcatactttaacaaatcactgaaaattggagttaggtattgacctctcagaatcagttgccgttctggaacattaaatgtattttttatgatatactccaacgcatttatgtgggcatacaacaagtcattactaatggaatattccaagagttttagttgtctagtatttaacaagagaagagatttcaacagactgtttatgaactcgaatgccgcctcattgtcgcttatattgatgatgtcgaattctcccaatatcatcaccgatgagtagctcatcttgttatcgggatccaagttttctaaagatgtcattaaaccctcgatcatgaatggatttatcatcatcgtttttatgttggacatgagcttagtccgtttgtccacatctatagaagatgatttctgaattatttcatatatctctctctttaactccaggaacttgtcaggatggtctactttaatatgttctcgtctaagagatgaaaatctttggatggttgcacgcgacttttctctaaaggatgacgttgcccaagatcctctcttaaatgaatccatcttatccttggacaagatggacagtctattttccttagatggtttaatatttttgttacccatgatctataaaggtagacctaatcgtctcggatgaccatatatttattttcagttttattatacgcataaattgtaaaaaatatgttaggtttacaaaaatgtctcgtggggcattaatcgtttttgaaggattggacaaatctggaaaaacaacacaatgtatgaacatcatggaatctataccggcaaacacgataaaatatcttaactttcctcagagatccactgtcactggaaaaatgatagatgactatctaactcgtaaaaaaacctataatgatcatatagttaatctattattttgtgcaaatagatgggagtttgcatcttttatacaagaacaactagaacagggaattactttaatagttgatagatacgcattttctggagtagcgtatgccgccgctaaaggcgcgtcaatgactctcagtaagagttatgaatctggattgcctaaacccgacttagttatattcttggaatctggtagcaaagaaattaatagaaacgtcggtgaggaaatttatgaagatgttacattccaacaaaaggtattacaagaatataaaaaaatgattgaagaaggagatattcattggcaaattatttcttctgaattcgaggaagatgtaaagaaggagttgattaagaatatagttatagaggctatacacacggttactggaccagtggggcaactgtggatgtaatagtgaaattacattttttataaatagatgttagtacagtgttataaatggatgaagcatattactctggcaacttggaatcagtactcggatacgtgtccgatatgcataccgaactcgtatcaatatctcaattagttattgccaagatagaaactatagataatgatatattaaacaaggacattgtaaattttatcatgtgtagatcaaacttggataatccatttatctctttcctagatactgtatatactattatagatcaagagaactatcagactgagttgattaattcattagacgacaatgaaattatcgattgtatagttaataagtttatgagcttttataaggataacctagaaaatatagtagatgctatcatcactctaaaatatataatgaataatccagattttaaaactacgtatgcagaagtactcggttccagaatagcggatatagatattaaacaagtgatacgtgagaatatactacaattgtctaataatatccgcgaacgatatttgtgaaaatattaaaaaaaaatactttttttattaaatgacgtcttttcgtgaatttagaaaattatgctgtgctatatatcacgcatcaggatataaagaaaaatctaaattaattagagactttataacagatagggatgataaatatttgatcattaagctattgcttcccggattagacgatagaatttataacatgaacgataaacaaattataaaattatatagtataatatttaaacaatctcaggaagatatgctacaagatttaggatacggatatataggagacactattaggactttcttcaaagagaacacagaaatccgtccacgagataaaagcattttaactttagaagaagtggatagtttcttaactacgttatcatccgtaactaaagaatcgcatcaaataaaattattgactgatatcgcatccgtttgtacatgtaatgatttaaaatgtgtagtcatgcttattgataaagatctaaaaattaaagcgggtcctcggtacgtacttaacgctattagtcctcatgcctatgatgtgtttagaaaatctaataacttgaaagagataatagaaaatgcatctaaacaaaatctagactctatatctatttctgttatgactccaattaatcccatgttagcggaatcgtgtgattctgtcaataaggcgtttaaaaaatttccatcaggaatgtttgcggaagtcaaatacgatggtgaaagagtacaagttcataaaaataataacgagtttgccttctttagtagaaacatgaaaccagtactctctcataaagtggattatctcaaagaatacataccgaaagcatttaaaaaagctacgtctatcgtattggattctgaaattgttcttgtagacgaacataatgtaccgctcccgtttggaagtttaggaatacacaaaaagaaagaatataaaaactctaacatgtgtttgttcgtgtttgactgtttgtactttgatggattcgatatgacggacattccattgtacgaacgaagatcttttctcaaagatgttatggttgaaatacccaatagaatagtattctcagagttgacgaatattagtaacgagtctcagttaactgacgtattggatgatgcactaacgagaaaattagaaggattggtcttaaaagatattaatggagtatacgaaccgggaaagagaagatggttaaaaataaagcgagactatttgaacgagggttccatggcagattctgccgatttagtagtactaggtgcttactatggtaaaggagcaaagggtggtatcatggcagtctttctaatgggttgttacgacgatgaatccggtaaatggaagacggttaccaagtgttcaggacacgatgataatacgttaagggagttgcaagaccaattaaagatgattaaaattaacaaggatcccaaaaaaattccagagtggttagtagttaataaaatctatattcccgattttgtagtagaggatccgaaacaatctcagatatgggaaatttcaggagcagagtttacatcttccaagtcccataccgcaaatggaatatccattagatttcctagatttactaggataagagaggataaaacgtggaaagaatctactcatctaaacgatttagtaaacttgactaaatcttaatagttacatacaaactgaaaattaaaataacactatttagttggtggtcgccatggatggtgttattgtatactgtctaaacgcgctagtaaaacatggcgaggaaataaatcatataaaaaatgatttcatgattaaaccatgttgtgaaagagtttgtgaaaaagtcaagaacgttcacatcggcggacaatctaaaaacaatacagtgattgcagatttgccatatctggataatgctgtatcggatgtatgcaattcactgtataaaaagaatgtatcaagaatatccagatttgctaatttgataaagatagatgacgatgacaagactcctactggtgtatataattattttaaacctaaagatgccattcctgttattatatctataggaaaggatagagatgtctgtgaactattaatctcatcagacatatcgtgtgcatgcgtggagttaaattcatatcacgtagccattcttcccatggatgtttccttttttaccaaaggaaatgcatcattgattattctcctgtttgatttctctatcgatgcggcacctctcttaagaagtgtaaccgataataatgttattatatctagacaccagcgtctacatgacgagcttccgagttccaattggttcaagttttacataagtataaagtccgactattgttctatattatatatggttgttgatggatctgtgatgcatgcgatagctgataatagaactcacgcaattattagcaaaaatatattagacaatactacgattaacgatgagtgtagatgctgttattttgaaccacagattaggattcttgatagagatgagatgctcaatggatcatcgtgtgatatgaacagacattgtattatgatgaatttacctgatgtaggcgaatttggatctagtatgttggggaaatatgaacctgacatgattaagattgctctttcggtggctggtaatttaataagaaatcgagactacattcccgggagacgaggctatagctactacgtttacggtatagcctctagataatttttttaagcacgaaataaaaaacataattttaaaccaatctatttcatactattttgtgtgatcaccatggacataaagatagatattagtatttctggtgataaatttacggtgactactaggagggaaaatgaagaaagaaaaaaatatctacctctccaaaaagaaaaaactactgatgttatcaaacctgattatcttgagtacgatgacttgttagatagagatgagatgtttactattctagaggaatattttatgtacagaggtctattaggcctcagaataaaatatggacgactctttaacgaaattaaaaaattcgacaatgatgcggaagaacaattcggtactatagaagaactcaagcagaaacttagattaaattctgaagagggagcagataactttatagattatataaaggtacaaaaacaggatatcgtcaaacttactgtatacgattgcatatctatgataggattgtgtgcatgcgtggtagatgtttggagaaatgagaaactgttttctagatggaaatattgtttacgagcgattaaactgtttattgatgatcacatgcttgataagataaaatctatactgcagaatagactagtatatgtggaaatgtcatagaaagttaaaagttaatgagagcaaaaatatataaggttgtattccatatttgttattttttctgtaatagttaaaaaaatacattcgatggtctatctatcagattattatgtgttataaggtactttttctcataataaactagagtatgagtaagatagtgtttttcaaaacatataaatctaaaattgatggatgagatatacagctattaatttcgaaaatatattttaatctgataactttaaacatggatttttgatggtggtttaacgttttaaaaaaagattttgttattgtagtatatgataatattaaaagatggatataaagaatttgctgactgcatgtactattttttacattactacattggctacggcagatatacctacttcgtcaccaacggggcatgtgacgagggagaatatcttgataagaggcataatcaatgttgtaatcagtgtccacctggagaatttgccaaggttagatgtaatggtaacgataacacaaaatgtgaacgctgcccacctcatacatataccgcaatccccaattactctaatggatgtcatcaatgtagaaaatgcccaacaggatcatttgataaggtaaagtgtaccggaacacagaacagtaaatgttcgtgtcttcctggttggtattgcgctactgattcttcacagactgaagattgtcgagattgtataccaaaaaggagatgtccatgcggatactttggtggaatagatgaacaaggaaatcctatttgtaaatcgtgttgtgttggtgaatattgcgactacctacgtaattatagacttgatccatttcctccatgcaaactatctaaatgtaattaattatgattttgatgataatgttaccatacattatatcgctacttggttagtgtattattcagtatgaagacctattaataattacttatcttttgacgatcttgttataattataatataaaaacttatggcatagtaacttataattgctgacgcgataaattcgtaataatctgttttgttcaaaggaatctacaggcataaaaataaaaatataatttataatatactcttacaacgccatcatgaataacagcagtgaattgattgctgttattaatggatttagaaatagtggacgattttgtgatattagtatagttattaatgatgaaaggataaacgctcataaactcatcctatctggagcctccgaatatttttccattctgttttccaataattttatcgattctaatgaatacgaagttaatctaagtcatttagattatcaaagtgttaacgatttgatcgattatatttatgggatacctttgagcctaactaacgataacgtgaaatatattctttcaaccgctgattttttacaaattggatctgccattactgagtgtgaaaattacatacttaaaaatctttgttctagaaactgtatcgatttctacatatacgctgataaatataataacaagaaaatagaatcagcgtcgtttaacacaatattacaaaatattttgagactcatcaacgatgaaaactttaaatacttaacagaggaatcaatgataaaaattttaagcgatgatatgttaaatataaaaaatgaggatttcgccccactaattctcattaaatggttagagagtactcaacaaccatgcaccgtcgagttacttaaatgcctcagaatatcattgctttccccacaagttataaaatcactttatagtcatcgactggttagttcaatctacgaatgtataacattcttaaacaatatagcattcttggatgaatcatttcctagataccatagcatcgagttgatatctatcggtataagtaattcgcatgataagatttccataaactgctacaatcataaaaaaaatacatgggaaatgatatcttcacgtagatataggtgtagtttcgcagtggccgtcctggataatattatctatatgatgggtggatatgatcagtccccgtatagaagttcaaaggttatagcgtacaatacatgtacaaattcttggatatatgatataccagagctaaaatatcctcgttctaattgtgggggactggctgatgacgaatacatttattgtataggcggcatacgcgatcaggattcatcgttgacatctagtattgatagatggaagccatcaaaaccatattggcagaagtatgctaaaatgcgcgaaccaaaatgtgatatgggggttgcgatgttaaacggattaatatatgttataggtggaatcgttaaaggtgacacgtgtaccgacgcactagagagtttatcagaagatggatggatgaagcatcaacgtcttccaataaaaatgtccaatatgtcgacgattgttcatgatggcaagatttatatatctggaggttacaacaatagtagtgtagttaatgtaatatcgaatctagtccttagctataattcgatatatgatgaatggaccaaattatcatcattaaacattcctagaattaatcccgctctatggtcagcgcataataaattatatgtaggaggaggaatatctgatgatgttcgaactaatacatctgagacatacgacaaagaaaaagattgttggacattggataatggtcacgtgttaccacgcaattatataatgtataaatgcgaaccgattaaacataaatatccattggaaaaaacacagtacacgaatgattttctaaagtatttggaaagttttataggtagttgatagaacaaaatacataattttgtaaaaataaatcactttttatactaatatgacacgattaccaatacttttgttactaatatcattagtatactctacaccttctcctcagacatctaaaaaaataggtgatgatgcaactctatcatgtaatcgaaataatacaaatgactacgttgttatgagtgcttggtataaggagcccaattccattattcttttagctgctaaaagcgacgtcttgtattttgataattataccaaggataaaatatcttacgactctccatacgatgatctagttacaactatcacaattaaatcattgactgctagagatgccggtacttatgtatgtgcattctttatgacatcgcctacaaatgacactgataaagtagattatgaagaatactccacagagttgattgtaaatacagatagtgaatcgactatagacataatactatctggatctacacattcaccggaaactagttctgagaaacctgattatatagataattctaattgctcgtcggtattcgaaatcgcgactccggaaccaattactgataatgtagaagatcatacagacaccgtcacatacactagtgatagcattaatacagtaagtgcatcatctggagaatccacaacagacgagactccggaaccaattactgataaagaagaagatcatacagtcacagacactgtctcatacactacagtaagtacatcatctggaattgtcactactaaatcaaccaccgatgatgcggatctttatgatacgtacaatgatacagtaccaccaactactgtaggcggtagtacaacctctattagcaattataaaaccaaggactttgtagaaatatttggtattaccgcattaattatattgtcggccgtggcaatattctgtattacatattatatatataataaacgttcacgtaaatacaaaacagagaacaaagtctagatttttgacttacataaatgtctgggatagtaaaatctatcatattgagcgggccatctggtttaggaaagacagccatagccaaaagactatgggaatatatttggatttgtggtgtcccataccactagatttcctcgtcctatggaacgagaaggtgtcgattaccattacgttaacagagaggccatctggaagggaatagccgccggaaactttctagaacatactgagtttttaggaaatatttacggaacttctaaaacagctgtgaatacagcggctattaataatcgtatttgtgtgatggatctaaacatcgatggcgttagaagtcttaaaaatacgtacctaatgccttactcggtgtatataagacctacctctcttaaaatggttgagaccaagcttcgtcgtagaaacactgaagcggatgatgagattcatcgtcgtgtgatgttggcaaaaactgacatggatgaggcaggtgaagccggtctattcgacactattatcattgaagatgatgtgaatttagcatatagtaagttaattcagatactacaggaccgtattagaatgtattttaacactaattagagacttaagacttaaaacttgataattaataatataactcgtttttatatgtggctatttcaacgtctaatgtattagttaaatattaaaacttaccacgtaaaacttaaaatttaaaatgatatttcattgacagatagatcacacattatgaactttcaaggacttgtgttaactgacaattgcaaaaatcaatgggtcgttggaccattaataggaaaaggtggattcggtagtatttatactactaatgacaataattatgtagtaaaaatagagcccaaagctaacggatcattatttaccgaacaggcattttatactagagtacttaaaccatccgttatcgaagaatggaaaaaatctcacaatataaagcacgtaggtcttatcacgtgcaaggcatttggtctatacaaatccattaatgtggaatatcgattcttggtaattaatagattaggtgtagatctagatgcggtgatcagagccaataataatagattaccaaaaaggtcggtgatgttgatcggaatcgaaatcttaaataccatacaatttatgcacgagcaaggatattctcacggagatattaaagcgagtaatatagtcttagatcaaatagataagaataaattatatctagtggattacggattggtttctaaattcatgtctaatggcgaacatgttccatttataagaaatccaaataaaatggataacggtactctagaatttacacctatagattcgcataaaggatacgttgtatctagacgtggagatctagaaacacttggatattgtatgattagatggttgggaggtatcttaccatggactaagatatctgaaacaaagaattgtgcattagtaagtgccacaaaacagaaatatgttaacaatactgcgactttgttaatgaccagtttgcaatatgcacctagagaattgctgcaatatattaccatggtaaactctttgacatattttgaggaacccaattacgacaagtttcggcacatattaatgcagggtgtatattattaagtgtggtgtttggtcgataaaaattaaaaaataacttaatttattattgatctcgtgtgtacaaccgaaatcatggcgatgttttacgcacacgctctcggtgggtacgacgagaatcttcatgcctttcctggaatatcatcgactgttgccaatgatgtcaggaaatattctgttgtgtcagtttataataacaagtatgacattgtaaaagacaaatatatgtggtgttacagtcaggtgaacaagagatatattggagcactgctgcctatgtttgagtgcaatgaatatctacaaattggaaatccgatccatgatcaagaaggaaatcaaatctctatcatcacatatcgccacaaaaactactatgctctaagcggaatcgggtacgagagtctagacttgtgtttggaaggagtagggattcatcatcacgtacttgaaacaggaaacgctgtatatggaaaagttcaacatgattattctactatcaaagagaaggccaaagaaatgagtgcacttagtccaggacctatcatcgattaccacgtctggataggagattgtatctgtcaagttactgctgtggacgtacatggaaaggaaattatgaaaatgagattcaaaaagggtgcggtgcttccgatcccaaatctggtaaaagttaaacttggggagaatgatacagaaaatctttcttctactatatcggcgacaccatcgaggtaaccacctctctggaagacagcgtgaataatgtactcatgaaacgtttggaaactatacgccatatgtggtctgttgtatatgatcattttgatattgtgaatggtaaagaatgctgttatgtgcatacgcatttgtctaatcaaaatcttataccgagtactgtaaaaacaaatttgtacatgaagactatgggatcatgcattcaaatggattccatggaagctctagagtatcttagcgaactgaaggaatcaggtggatggagtcccagaccagaaatgcaggaatttgaatatccagatggagtggaagacactgaatcaattgagagattggtagaggagttcttcaatagatcagaacttcaggctggtgaatcagtcaaatttggtaattctattaatgttaaacatacatctgtttcagctaagcaactaagaacacgtatacggcagcagcttccttctatactctcatcttttaccaacacaaagggtggatatttgttcattggagttgataataatacacacaaagtatttggattcacggtgggttacgactacctcagactgatagagaatgatatagaaaagcatatcaaaagactttgtgttgtgtatttctgtgagaagaaagaggacatcaagtacgcgtgtcgattcatcaaggtatataaacctggggatgaggctacctcgacatacgtgtgcgctatcaaagtggaaagatgctgttgtgctgtgtttgcagattggccagaatcatggtatatggatactaatggtatcaagaagtattctccagatgaatgggtgtcacatataaaattttaattaatgtaactatagagaacaaataataaggttgtaatatcatatagacaataactaacaattaattagtaactgttatctcttttttaattaaccaactaactatatacctattaatacatcgtaattatagttcttaacatctattaatcattaattcgcttctttaattttttataaactaacattgttaattgaaaagggataacatgttacagaatataaattatatatggatttttttaaaaaggaaatacttgactggagtatatatttatctcttcattatatagcacgcgtgttttccaatttttccacatcccatataatacaggattataatctcgttcgaacatacgagaaagtggataaaacaatagttgattttttatctaggttgccaaatttattccatattttagaatatggggaaaatattctacatatttattctatggatgatgctaatacgaatattataattttttttctagatagagtattaaatattaataagaacgggtcatttatacacaatctcgggttatcatcatccattaatataaaagaatatgtatatcaattagttaataatgatcatccagataataggataagactaatgcttgaaaatggacgtagaacaagacattttttgtcctatatatcagatacagttaatatctatatatgtattttaataaatcatggattttatatagatgccgaagacagttacggttgtacattattacatagatgtatatatcactataagaaatcagaatcagaatcatacaatgaattaattaagatattgttaaataatggatcagatgtagataaaaaagatacgtacggaaacacaccttttatcctattatgtaaacacgatatcaacaacgtggaattgtttgagatatgtttagagaatgctaatatagactctgtagactttaatagatatacacctcttcattatgtctcatgtcgtaataaatatgattttgtaaagttattaatttctaaaggagcaaatgttaatgcgcgtaataaattcggaactactccattttattgtggaattatacacggtatctcgcttataaaactatatttggaatcagacacagagttagaaatagataatgaacatatagttcgtcatttaataatttttgatgctgttgaatctttagattatctattatccagaggagttattgatattaactatcgtactatatacaacgaaacatctatttacgacgctgtcagttataatgcgtataatacgttggtctatctattaaacaaaaatggtgattttgagacgattactactagtggatgtacatgtatttcggaagcagtcgcaaacaacaacaaaataataatggaagtactattgtctaaacgaccatctttgaaaattatgatacagtctatgatagcaattactaaacataaacagcataatgcagatttattgaaaatgtgtataaaatatactgcgtgtatgaccgattatgatactcttatagatgtacagtcgctacagcaatataaatggtatattttaagatgtttcgatgaaatagatatcatgaagagatgttatataaaaaataaaactgtattccaattagttttttgtatcaaagacattaatactttaatgagatacggtaaacatccttctttcgtgaaatgcactagtctcgacgtatacggaagtcgtgtacgtaatatcatagcatctattagatatcgtcagagattaattagtctattatccaagaagctggatcctggagataaatggtcgtgttttcctaacgaaataaaatataaaatattggaaaactttaacgataacgaactatccacatatctaaaaatcttataaacattattaaaatataaaatctaagtaggataaaatcacactacatcattgtttccttttagtgctcgacagtgtatactatttttaacgctcataaataaaaatgaaaacgatttccgttgttacgttgttatgcgtactacctgctgttgtttattcaacatgtactgtacccactatgaataacgctaaattaacgtctaccgaaacatcgtttaatgataaccagaaagttacgtttacatgtgatcagggatatcattctttggatccaaatgctgtctgtgaaacagataaatggaaatacgaaaatccatgcaaaaaaatgtgcacagtttctgattatgtctctgaactatataataaaccgctatacgaagtgaattccaccatgacactaagttgcaacggcgaaacaaaatattttcgttgcgaagaaaaaaatggaaatacttcttggaatgatactgttacgtgtcctaatgcggaatgtcaacctcttcaattagaacacggatcgtgtcaaccagttaaagaaaaatactcatttggggaatatatgactatcaactgtgatgttggatatgaggttattggtgcttcgtacataagttgtacagctaattcttggaatgttattccatcatgtcaacaaaaatgtgatatgccgtctctatctaacggattaatttccggatctacattttctatcggtggcgttatacatcttagttgtaaaagtggttttacactaacggggtctccatcatccacatgtatcgacggtaaatggaatcccgtactcccaacatgtgtacgatctaacgaaaaatttgatccagtggatgatggtcccgacgatgagacagatttgagcaaactctcgaaagacgttgtacaatatgaacaagaaatagaatcgttagaagcaacttatcatataatcatagtggcgttgacaattatgggcgtcatatttttaatctccgttatagtattagtttgttcctgtgacaaaaataatgaccaatataagttccataaattgctaccgtgaatataaatccgttaaaataattaataatttaataacgaacaagtatcaaaagattaaagacttatagctagaatcaattgagatgtcttcttcagtggatgttgatatctacgatgccgttagagcatttttactcaggcactattataacaagagatttattgtgtatggaagaagtaacgccatattacataatatatacaggctatttacaagatgcgccgttataccgttcgatgatatagtacgtactatgccaaatgaatcacgtgttaaacaatgggtgatggatacacttaatggtataatgatgaatgaacgcgatgtttctgtaagcgttggcaccggaatactattcatggaaatgtttttcgattacaataaaaatagtatcaacaatcaactaatgtatgatataattaatagcgtatctataattctagctaatgagagatatagaagcgcttttaacgacgatggtatatacatccgtagaaatatgattaacaagttgtacggatacgcatctctaactactattggcacgatcgctggaggtgtttgttattatctgttgatgcatctagttagtttgtataaataattatttcaatatactagttaaaattttaagattttaaatgtataaaaaactaataacgtttttatttgtaataggtgcattagcatcctattcgaataatgagtacactccgtttaataaactgagtgtaaaactctatatagatggagtagataatatagaaaattcatatactgatgataataatgaattggtgttaaattttaaagagtacacaatttctattattacagagtcatgcgacgtcggatttgattccatagatatagatgttataaacgactataaaattattgatatgtataccattgactcgtctactattcaacgcagaggtcacacgtgtagaatatctaccaaattatcatgccattatgataagtacccttatattcacaaatatgatggtgatgagcgacaatattctattactgcagagggaaaatgctataaaggaataaaatatgaaataagtatgatcaacgatgatactctattgagaaaacatactcttaaaattggatctacttatatatttgatcgtcatggacatagtaatacatattattcaaaatatgatttttaaaaatttaaaatatattatcacttcagtgacagtagtcaaataacaaacaacaccatgagatatattataattctcgcagttttgttcattaatagtatacacgctaaaataactagttataagtttgaatccgtcaattttgattccaaaattgaatggactggggatggtctatacaatatatcccttaaaaattatggcatcaagacgtggcaaacaatgtatacaaatgtaccagaaggaacatacgacatatccgcatttccaaagaatgatttcgtatctttctgggttaaatttgaacaaggcgattataaagtggaagagtattgtacgggactatgcgtcgaagtaaaaattggaccaccgactgtaacattgactgaatacgacgaccatatcaatttgtacatcgagcatccgtatgctactagaggtagcaaaaagattcctatttacaaacgcggtgacatgtgtgatatctacttgttgtatacggctaacttcacattcggagattctaaagaaccagtaccatatgatatcgatgactacgattgcacgtctacaggttgcagcatagactttgtcacaacagaaaaagtgtgcgtgacagcacagggagccacagaagggtttctcgaaaaaattactccatggagttcgaaagtatgtctgacacctaaaaagagtgtatatacatgcgcaattagatccaaagaagatgttcccaatttcaaggacaaaatggccagagttatcaagagaaaatttaatacacagtctcaatcttatttaactaaatttctcggtagcacatcaaatgatgttaccacttttcttagcatgcttaacttgactaaatattcataactaatttttattaatgatacaaaaacgaaataaaactgcatattatacactggttaacgcccttataggctctaaccattttcaagatgaggtccctgattatagtccttctgttcccctctatcatctactccatgtctattagacgatgtgagaagactgaagaggaaacatggggattgaaaatagggttgtgtataattgccaaagatttctatcccgaaagaactgattgcagtgttcatctcccaactgcaagtgaaggattgataactgaaggcaatggattcagggatatacgaaacaccgataaattataaaaaaagcaatgtgtccgctgtttccgttaataatactattttcgtaactggcggattattcataaataactctaatagcacgatcgtggttaacaatatggaaaaacttgacatttataaagacaaacaatggtcgattatagaaatgcctatggctagggtatatcacggcatcgactcgacatttggaatgttatattttgccggaggtctatccgttaccgaacaatatggtaatttagagaaaaacaacgagatatcttgttacaatcctagaacgaataagtggtttgatatttcatatactatttataagatatccatatcatcattgtgtaaactaaataacgtcttctatgtatttagtaaggacattggatatgtggaaaagtatgatggtgcatggaagttagtacatgatcgtctccccgctataaaggcattatcaacttctccttattgattgaaaatgaaaatataaatagtttttatgtatagcagtattaccctatagttttattgcttactactaacatggatacagatgttacaaatgtagaagatatcataaatgaaatagatagagagaaagaagaaatactaaaaaatgtagaaattgaaaataataaaaacattaacaagaatcatcccaatgaatatattagagaagcactcgttattaataccagtagtaatagtgattccattgataaagaagttatagaatgtatcagtcacgatgtaggaatatagatcatatctactaatttttataatcgatacaaaacataaaaaacaactcgttattacatagcaggcatggaatccttcaagtattgttttgataacgatggcaagaaatggattatcggaaatactttatattctggtaattcaatactctataaggtcagaaaaaatttcactagttcgttctacaattacgtaatgaagatagatcacaaatcacacaagccattgttgtctgaaatacgattctatatatctgtattggatcctttgactatcgacaactggacacgggaacgtggtataaagtatttggctattccagatctgtatggaattggagaaaccgatgattatatgttcttcgttataaagaattcgggaagagtattcgccccaaaggatactgaatcagtcttcgaagcatgcgtcactatgataaacacgttagagtttatacactctcgaggatttacccatggaaaaatagaaccgaggaatatactgattagaaataaacgtctttcactaattgactattctagaactaacaaactatacaagagtggaaactcacatatagattacaacgaggacatgataacttcaggaaatatcaattatatgtgtgtagacaatcatcttggagcaacagtttcaagacgaggagatttagaaatgttgggatattgcatgatagaatggttcggtggcaaacttccatggaaaaacgaaagtagtataaaagtaataaaacaaaaaaaagaatataaaaaatttatagctactttctttgaggactgttttcctgaaggaaatgaacctctggaattagttagatatatagaattagtatacacgttagattattctcaaactcctaattatgacagactacgtaaactgtttatacaagattgaaattatattcttttttttatagagtgtggtagtgttacggatatctaatattaatattagactatctctatcgcgctacacgaccaatatcgattactatggatatcttctatgaaaggagagaatgtatttatttctccagcgtcaatctcgtcagtattgacaatactgtattatggagctaatggatccactgctgaacagctatcaaaatatgtagaaacggaggagaacacggataaggttagcgctcagaatatctcattcaaatccatgaataaagtatatgggcgatattctgccgtgtttaaagattcctttttgagaaaaattggcgataagtttcaaactgttgacttcactgattgtcgcactatagatgcaatcaacaagtgtgtagatatctttactgaggggaaaatcaatccactattggatgaaccattgtctcctagcaattagtgccgtatactttaaagcaaaatggttgacgccattcgaaaaggaatttaccagtgattatcccttttacgtatctccgacggaaatggtagacgtaagtatgatgtctatgtacggcaaggcatttaatcacgcatctgtaaaagaatcattcggcaacttttcaatcatagaactgccatatgttggagatactagtatgatggtcattcttccagacaagattgatggattagaatccatagaacaaaatctaacagatacaaattttaagaaatggtgtgactttatggatgctatgtttatagatgttcacattcccaagtttaaggtaacaggctcgtataatctggtggatactctagtaaagtcaggactgacagaggtgttcggttcaactggagattatagcaatatgtgtaatttagatgtgagtgtcgacgctatgatccacaaaacgtatatagatgtcaatgaagagtatacagaagcagctgcagcaacttctgtactagtggcagactgtgcatcaacaattacaaatgagttctgtgcagatcatccgttcatctatgtgattaggcatgttgatggaaaaattcttttcgttggtagatattgctctccgacaactaattgttaaccattttttttaaaaaaaatagaaaaaacatgtggtattagtgcaggtcgttgttcttccaattgcaattggtaagatgacggccaactttagtacccacgtcttttcaccacagcactgtggatgtgacagactgaccagtattgatgacgtcaaacaatgtttgactgaatatatttattggtcgtcctatgcataccgcaacaggcaatgcgctggacaattgtattccacactcctctcttttagagatgatgcggaattagtgttcatcgacattcgcgagctggtaaaaaatatgccgtgggatgatgtcaaagattgtacagaaatcatccgttgttatataccggatgagcaaaaaaccatcagagagatttcggccatcatcggactttgtgcatatgctgctacttactggggaggtgaagaccatcccactagtaacagtctgaacgcattgtttgtgatgcttgagatgctaaattacgtggattataacatcatattccggcgtatgaattgatgagttgtacatcttgacattttctttcttctcttctccctttcttctcttctcccttcctccctcttctccctttcccagaaacaaacttttttacccactataaaataaaatgagtatactacctgttatatttctttctatatttttttattcttcattcgttcagacttttaacgcgtctgaatgtatcgacaaagggcaatattttgcatcattcatggagttagaaaacgagccagtaatcttaccatgtcctcaaataaatacgctatcatccggatataatatattagatattttatgggaaaaacgaggagcggataatgatagaattataccgatagataatggtagcaatatgctaattctgaacccgacacaatcagactctggtatttatatatgcattaccacgaacgaaacctactgtgacatgatgtcgttaaatttgacaatcgtgtctgtctcagaatcaaatatagattttatctcgtatccacaaatagtaaatgagagatctactggcgaaatggtatgtcccaatattaatgcatttattgctagtaacgtaaacgcagatattatatggagcggacatcgacgccttagaaataagagacttaaacaacggacacctggaattattaccatagaagatgttagaaaaaatgatgctggttattatacatgtgttttagaatatatatacggtggcaaaacatataacgtaaccagaattgtaaaattagaggtacgggataaaataataccttctactatgcaattaccagatggcattgtaacttcaataggtagtaatttgactattgcatcgttgagacctcccacaacggatgcagacgtcttttggataagtaatggtatgtattacgaagaagatgatggggacggaaacggtagaataagtgtagcaaataaaatctatatgaccgataagagacgtgttattacatcccggttaaacattaatcctgtcaaggaagaagatgctacaacgtttacgtgtatggcgtttactattcctagcatcagcaaaacagttactgttagtataacgtgaatgtatgttgttacatttccatgtcaattgagtttataagaatttttatacattatcttccaacaaacaattgacgaacgtattgctatgattaactcccacgatactatgcatattattaatcattaacttgcagactatacctagtgctattttgacatactcatgttcttgtgtaattgcggtatctatattattaaagtacgtaaatctagctatagttttattatttaattttagataatataccgtctccttatttttaaaaattgccacatcctttattaaatcatgaatgggaatttctatgtcatcgttagtatattgtgaacaacaagagcagatatctataggaaagggtggaatgcgatacattgatctatgtagttttaaaacacacgcgaactttgaagaatttatataaatcattccatcgatacatccttctatgttgagatgtatatatccaggaattcgtttattaatatcgggaaatgtataaactaaaacattgcccgaaagcggtgcctctatctgcgttatatccgttcttaacttacaaaatgtaaccaatacctttgcatgacttgttttgttcggcaacgttagtttaaacttgacgaatggattaattacaatagcatgatccgcgcatctattaagtttttttactttaacgcccttgtatgtttttacagagactttatctaaatttctagtacttgtatgtgttataaatataacgggatatagaaccgaatcacctaccttagatacccaattacattttatcagatccagataataaacaaattttgtcgccctaactaattctatattgttatatattttacaattggttatgatatcatgtaataacttggagtctaacgcgcatcgtcgtacgtttatacaattgtgatttagtgtagtatatctacacatgtatttttccgcactatagtattctggactagtgataaaactatcgttatatctgtcttcaatgaactcatcgagatattgctctctgtcatattcatacacctgcataaactttctagacatcttacaatccgtgttattttaggatcatatttacatatttacgggtatatcaaagatgttagattagttaatgggaatcgtctataataatgaatattaaacaattatatgaggacttttaccacaaagcatcataaaaatgagtcgtcgtctgatttatgttttaaatatcaaccgcgaatcaactcataaaatacaagagaatgaaatatatacatattttagtcattgcaatatagaccatacttctacagaacttgattttgtagttaaaaactatgatctaaacagacgacaacctgtaactgggtatactgcactacactgctatttgtataataattactttacaaacgatgtactgaagatattattaaatcatggagtggatgtaacgatgaaaaccagtagcggacgtatgcctgtttatatattgcttactagatgttgtaatatttcacatgatgtagtgatagatatgatagacaaagataaaaaccacttatcgcatagagactattccaacctactactagagtatataaaatctcgttacatgttattaaaggaagaggatatcgatgagaacatagtatccactttattagataagggaatcgatcctaactttaaacaagacggatatacagcgttacattattatttgtgtctcgcacacgtttataaaccaggtgagtgtagaaaaccgataacgataaaaaaggccaagcgaattatttctttgtttatacaacatggagctaatctaaacgcgttagataattgtggtaatacaccattccatttgtatcttagtattgaaatgtgtaataatattcatatgactaaaatgctgttgacttttaatccgaatttcaaaatatgtaataatcatggattaacgcctatactatgttatataacttccgactacatacaacacgatattcttgttatgttaatacatcactatgaaacaaatgttggagaaatgccgatagatgagcgtcgtataatcgtattcgagtttatcaaaacatattctacacgtccggcagattcgataacttatttgatgaataggtttaaaaatataaatatttatacccgctatgaaggaaagacattattacacgtagcatgtgaatataataatacacacgtaatagattatcttatacgtatcaacggagatataaatgcgttaaccgacaataacaaacacgctatccaactcattatagataacaaagaaaattccccatataccattaattgtttactgtatatacttagatatattgtagataagaatgtgataagatcgttggtggatcaacttccatctctacctatctttcgtcgcttatcatactagtcatatcctaaatgttgatcatattccaccaaatgattgtgaaagagattgagattaaatcgtctaacaaacaattagtttttatgacattaacatataataaataaattaatcattattgacttaacgatgacgaaagttatcatcatcttaggattcttgattattaatacaaattcattgtctatgaaatgtgaacaaggtgtctcatattataattcacaagaattaaagtgttgtaaactatgtaagccaggaacatattcagatcatcgatgtgataaatacagcgataccatttgtggacattgtccgagtgacacattcacgtcaatatataatcgttctccttggtgtcatagttgtagaggtccatgtggtactaatcgagtagaggtcacaccttgtacacctaccacaaatagaatctgtcattgtgactcgaatagttattgtctccttaaagcttttgatggtaactgtgttacatgtgctcctaaaacaaaatgtggtcgtgggtatggaaagaaaggagaagatgaaatgggtaataccatttgtaagaaatgtcggaagggtacttattcagatattgtatctgactctgatcaatgtaaaccaatgacaagataagacttactcgcatctactggatagacataaaatatcctcctcgtaataatgaaatataatatacactaattattaatatcaataacaatcgagtattaatatataggtcatttttaaatcccttttgggttccgtcccaaacggcgtttcggtctgcgtcgccgccatggccatgccgagcctctccgcgtgctcctccatcgaggacgacttcaactatggcagctcggtggcgtctgccagcgtgcacatacgaatggcatttctaagaaaagtctacggtatcctttgtctacaatttcttttaacaacggcaacaactgcagtatttttatactttgactgcatgcggacatttatacaagggagtcctgttctaatattggcatcaatgttcggatctataggcttgattttcgcattgactttacacagacataaacatcccctgaatctgtacctgctttgtggatttacactgtcggaatctctaacgctggcctctgttgttactttctatgatgtgcatgtcgttatgcaagctttcatgctgactactgcagcgtttcttgctctgactacatatactctacaatcaaagagagatttcagtaaacttggagcaggattgtttgctgctttgtggattttaattttgtcaggactcttggggatatttgtgcaaaatgagacagtgaagctggtcctgtctgcttttggggcccttgtattctgtggattcattatctatgacacgcactcactaatacataagctctcgcctgaagagtatgtgttagcctctatcaatctctacttggatatcatcaatctgttcttgcatctgttgcagcttttggaagtatctaataagaaataaagtttaaaatagaattaataaaaacatataggtcattttttaaacatggattggaaaccaaggtagttagttaatacacacaagatatatttttttcacatcatccacccatgggtaacaccaaggttgttagttaataatatacaagatattttttctcactctgatccatgtaaaccaaggacgagataagacactctcattcctcatctacaaccccattaaaaaatggaaattaaagccctctattagcatagacggctacaggtctaccatcaggttaaccttcgtctaccttcacaatggcctttccttgtgcccagttcagaccctgtcattgccacgctactaaggactccctgaataccgtggccgacgtcagacattgtctgactgaatacatcctgtgggtttctcatagatggacccatagagaaagcgcagggtctctctacaggcttctcatctctttcagaactgatgcaacggagctctttggtggtgagttgaaggattcacttccgtgggacaattgcgtggagatcattaaatgtttcatcagaaatgactccatgaaaaccgccgaagaacttcgtgcaatcattggactttgtactcaatcagctatcgtctctggaagagtcttcaacgataagtatatcgacatactacttatgctgcgaaagattctgaacgagaacgactatctcaccctcttggatcatatccgcactgctaaatactaaatctccttcatgctctctcactacactttttatcatcttatgaggaatgattgccttcgtgaaataggaataattagcaccagaatagctatggattattgtggtagagagtgcactattctatgtcgtctactggatgaagatgtgacgtacaaaaaaataaaaccagagattgaaacgtgtcacaacttatcaaaacatatagatagacgaggaaacaatgcgctacattgttacgtcttcaataaatgcgatacagacattaagattgttcggctgttactctctcgcggagtcgagagactttgtagaaacaacgaaggattaactccgctaggagcatacagtaagcatagatacgtcaaatctcagattgtgcatctactgatatccagctattcgaattcctctaacgaactcaagtcgaatataaatgatttcgatctgtattcggataatatcgacttacgtctgctaaaatacctaattgtggataaacggatacgtccgtccaagaatacgaattatgcaatcaatggtctcggattggtggatatatacgtaacgacgcctaatccgagaccagaagtattgctatggcttcttaaatcagaatgttacagcaccggttacgtatttcgtacctgtatgtacgacagtgatatgtgtaagaactctcttcattactatatatcgtctcatagagaatctcaatctctatccaaggatgtaattaaatgtttgatcgataacaatgtttccatccatggcagagacgaaggaggatctttacccatccaatactactggtcttgctcaaccatagatatagagattgttaaattattaataaaggatgtggacacgtgtagagtatacgacgtcagccctatattagaggcgtattatctaaacaagcgatttagagtaaccccatataatgtagacatggaaatcgttaatcttcttattgagagacgtcatactcttgtcgacgtaatgcgtagtattacttcgtacgattccagagaatataaccactacatcatcgataacattctaaagagatttagacaacaggatgtacaagccatgttgataaactacttacattacggcgatatggtaagtatacctatcattcaatgcatgttggataacggagcaaccatggataagacgacggacaacaactatcctctacacgactactttgttaataataatctcgtcgatgtaaacgtcgtaaggtttatcgtggaaaatatggacacgcggctgtaaatcacatatctaacaatggccgtctatgtatgtacggtctgatattatcgagatttaataattgcgggtatcactgttatgaaaccatactgatagatgtatttgatatactaagcaagtacatggatgatatagatatgatcgataactctactatattacgcggtcgatgtcaataatatacaatttgcaaagcggttattggaatatggagcgagtgtcacgctcgataatcaatacggccatccagaaaagcagttaccaaagagaaaacaaaacgaggatagttgatttattacttagctaccatcccactctagagactatgattgacgcatttaatagagatatacgctatctatatcctgaaccattattcgcctgtatcagatacgccttaatcctagatgatgattttccttctaaagtaaagtatgatatctccggtcgtcataaggaactaaagcgctatagagtagacattaatagaatgaagaatgtctacatatcaggcgtctccatgtttgatatattctttaaacgaagcaaacgccacaaattgagatacgcaaagaatccgacatcaaatggtacaaaaaagaactaacgtccatcattacagaaactgtaaagaacaatgagaggatcgactccatagtggacaacattaatacagacgataacttgatttcgaaattacccatggagatactttattactccattaaataatttatcatggagcgataatgtcctgtttcatttgtttccatgacatattacaaaatcgattccgtccaagatgataaaaacatttaccggcatcataaacacggagtttattttatatgtctcgcataaacattactaaaaaaatatattgttctgtttttctttcacatctttaattatgaaaaagtaaatcattatgagatggacgagattgtacgcatcgttcgcgacagtatgtggtacatacctaacgtatttatggacgacggtaagaatgaaggtcacgtttctgtcaacaatgtctgtcatatgtattttacgttctttgatgtggatacatcgtctcatctgtttaagctagttattaaacactgcgatctgaataaacgaggtaactctccattacattgctatacgatgaatacacgatttaatccatctgtattaaagatattgttacaccacggcatgcgtaactttgatagcaaggatgaccactatcaatcgataacaagatctttgatatactaacggacaccattgatgactttagtaaatcatccgatctattgctgtgttatcttagatataaattcaatgggagcttaaactattacgttctgtacaaaggatccgaccctaattgcgccgacgaggatgaactcacttctcttcattactactgtaaacacatatccacgttctacgaaagcaattattacaagttaagtcacactaagatgcgagccgagaagcgattcatctacgcgataatagattatggagcaaacattaacgcggttacacacttaccttcaacagtataccaaacatagtcctcgtgtggtgtatgctcttttatctcgaggagccgatacgaggatacgtaataatcttgattgtacacccatcatggaacgattgtgcaacaggtcatattctcataatgttactcaattggcacgaacaaaaggaagaaggacaacatctactttatctattcataaaacataatcaaggatacactctcaatatactacggtatctattagataggttcgacattcagaaagacgaatactataataccgcctttcaaaattgtaacaacaatgttgcctcatacatcggatacgacatcaaccttccgactaaagacggtattcgacttggtgtttgaaaacagaaacatcatatacaaggcggatgttgtgaatgacatcatccaccacagactgaaagtatctctacctatgattaaatcgttgttctacaagatgtctctccctacgacgattactacgtaaaaaagatactagcctactgcctattaagggacgagtcattcgcggaactacatagtaaattctgtttaaacgaggactataaaagtgtatttatgaaaaatatatcattcgataagatagattccatcatcgtgacataagtcgcctcaaagagattcgaatctccgacaccgacctgtatacggtatcacagctatcttaaagccatacattcagacagtcacatttcatttcccatgtacgacgatctcatagaacagtgccatctatcgatggagcgtaaaagtaaactcgtcgacaaagcactcaataaattagagtctaccatcggtcaatctagactatcgtatttgcctccggaaattatgcgcaatatcatctaaacagtatgttgtacggaaagaaccattacaaatattatccatgatagaaagaaaatatctatatgattggagaagtaggaaacaggaacaagacaacgattactacattattaaatcatgaagtccgtattatactcgtatatattgtttctctcatgtataataataaacggaagagatatagcaccgcatgcaccatccgatggaaagtgtaaagacaacgaatacaaacgccataatttgtgtccgggaacatacgcttccagattatgcgatagcaagactaacacacgatgtacgccgtgtggttcgggtaccttcacatctcgcaataatcatttacccgcttgtctaagttgtaacggaagacgcgatcgtgtaacacgactcacaatagaatctgtgaatgctctcccggatattattgtcttctcaaaggatcatccggatgcaaggcatgtgtttcccaaacaaaatgtggaataggatacggagtatccggagacgtcatctgttctccgtgtggtctcggaacatattctcacaccgtctcttccgcagataaatgcgaacccgtacccagaaatacgtttaactatatcgatgtggaaattaacctgtatccagttaacgacacgtcgtgtactcggacgaccactaccggtctcagcgaatccatctcaacgtcggaactaactattactatgaatcataaagactgtaatcccgtctttcgtgatggatacttctccgttcttaataaggtagcaacttcaggattctttacaggagaaaggtgtgcactctgaatttcgagattaaatgcaataacaaagattcttcctccaaacagttaacgaaagcaaagaatgatactatcatgccgcattcggagacagtaactctagtgggcgacatctatatactatatagtaataccaatactcaagactacgaaactgatacaatctcttatcatgtgggtaatgttctcgatgtcgatagccatatgcccggtagttgcgatatacataaactgatcactaattccaaacccacccactttttatagtaagtttttcacccataaataataaatacaataattaatttctcgtaaaagtagaaaatatattctaatttattgcacggtaaggaagtagaatcataaagaacagtactcaatcaatagcaattatgaaacaatatatcgtcctggcatgcatgtgcctggcggcagctgctatgcctgccagtcttcagcaatcatcctcatcctcctcctcgtgtacggaagaagaaaacaaacatcatatgggaatcgatgttattatcaaagtcacaaagcaagaccaaacaccgaccaatgataagatttgccaatccgtaacggaaattacagagtccgagtcagatccagatcccgaggtggaatcagaagatgattccacatcagtcgaggatgtagatcctcctaccacttattactccatcatcggtggaggtctgagaatgaactttggattcaccaaatgtcctcagattaaatccatctcagaatccgctgatggaaacacagtgaatgctagattgtccagcgtgtccccaggacaaggtaaggactctcccgcgatcactcatgaagaagctcttgctatgatcaaagactgtgaagtgtctatcgacatcagatgtagcgaagaagagaaagacagcgacatcaagacccatccagtactcgggtctaacatctctcataagaaagtgagttacgaagatatcatcggttcaacgatcgtcgatacaaaatgcgtcaagaatctagagtttagcgttcgtatcggagacatgtgcaaggaatcatctgaacttgaggtcaaggatggattcaagtatgtcgacggatcggcatctgaaggtgcaaccgatgatacttcactcatcgattcaacaaaactcaaagcgtgtgtctgaatcgataactctattcatctgaaattggatgagtagggttaatcgaacgattcaggcacaccacgaattaaaaaagtgtaccggacactatattccggtttgcaaaacaaaaatgttcttaactacattcacaaaaagttacctctcgcgacttcttctttttctgtctcaatagtgtgatacgattatgacactattcctattcctattcctatttcctttcagagtatcacaaaaatattaaacctctttctgatggtctcataaaaaaagttttacaaaaatatttttattctctttctctctttgatggtctcataaaaaaagttttacaaaaatatttttattctctttctctctttgatggtctcataaaaaaagttttacaaaaatatttttattctctttctctctttgatggtctcataaaaaaagttttacaaaaatatttttattctctttctctctttgatggtctcataaaaaaagttttacaaaaatatttttattctctttctctctttgatggtctcataaaaaaagttttacaaaaatatttttattctctttctctctttgatggtctcataaaaaaagttttacaaaaatatttttattctctttctctctttgatggtctcataaaaaaagttttacaaaaatatttttattctctttctctctttgatggtctcataaaaaaagttttacaaaaatatttttattctctttctctctttgatggtctcataaaaaaagttttacaaaaatatttttattctctttctctctttgatggtctcataaaaaaagttttacaaaaatatttttattctctttctctctttgatggtctcataaaaaaagttttacaaaaatatttttattctctttctctctttgatggtctcataaaaaaagttttacaaaaatatttttattctctttctctctttgatggtctcataaaaaaagttttacaaaaatatttttattctctttctctctttgatggtctcataaaaaaagttttacaaaaatatttttattctctttctctctttgatggtctcataaaaaaagttttacaaaaatatttttattctctttctctctttgatggtctcataaaaaaagttttacaaaaatatttttattctctttctctctttgatggtctcataaaaaaagttttacaaaaatatttttattctctttctctctttgatggtctcataaaaaaagttttaatcg

SEQ ID NO: 6 - DNA, 188082 bp, Artificial Sequence
  LIVP 6.1.1
tcaaagagagaaagagaataaaaatatttttgtaaaactttttttatgagaccatcaaagagagaaagagaataaaaatatttttgtaaaactttttttatgagaccatcaaagagagaaagagaataaaaatatttttgtaaaactttttttatgagaccatcaaagagagaaagagaataaaaatatttttgtaaaactttttttatgagaccatcaaagagagaaagagaataaaaatatttttgtaaaactttttttatgagaccatcaaagagagaaagagaataaaaatatttttgtaaaactttttttatgagaccatcaaagagagaaagagaataaaaatatttttgtaaaactttttttatgagaccatcaaagagagaaagagaataaaaatatttttgtaaaactttttttatgagaccatcaaagagagaaagagaataaaaatatttttgtaaaactttttttatgagaccatcaaagagagaaagagaataaaaatatttttgtaaaactttttttatgagaccatcaaagagagaaagagaataaaaatatttttgtaaaactttttttatgagaccatcaaagagagaaagagaataaaaatatttttgtaaaactttttttatgagaccatcagaaagaggtttaatatttttgtgatactctgaaaggaaataggaataggaataggaatagtgtcataatcgtatcacactattgagacagaaaaagaagaagtcgcgagaggtaactttttgtgaatgtagttaagaacatttttgttttgcaaaccggaatatagtgtccggtacacttttttaattcgtggtgtgcctgaatcgttcgattaaccctactcatccaatttcagatgaatagagttatcgattcagacacacgctttgagttttgttgaatcgatgagtgaagtatcatcggttgcaccttcagatgccgatccgtcgacatacttgaatccatccttgacctcaagttcagatgattccttgcacatgtctccgatacgaacgctaaactctagattcttgacgcattttgtatcgacgatcgttgaaccgatgatatcttcgtaactcactttcttatgagagatgttagacccgagtactggatgggtcttgatgtcgctgtctttctcttcttcgctacatctgatgtcgatagacacttcacagtctttgatcatagcaagagcttcttcatgagtgatcgcgggagagtccttaccttgtcctggggacacgctggacaatctagcattcactgtgtttccatcagcggattctgagatggatttaatctgaggacatttggtgaatccaaagttcattctcagacctccaccgatgatggagtaataagtggtaggaggatctacatcctcgactgatgtggaatcatcttctgattccacctcgggatctggatctgactcggactctgtaatttccgttacggattggcaaatcttatcattggtcggtgtttggtcttgctttgtgactttgataataacatcgattcccatatgatgtttgttttcttcttccgtacacgaggaggaggatgaggatgattgctgaagactggcaggcatagcagctgccgccaggcacatgcatgccaggacgatatattgtttcataattgctattgattgagtactgttctttatgattctacttccttaccgtgcaataaattagaatatattttctacttttacgagaaattaattattgtatttattatttatgggtgaaaaacttactataaaaagtgggtgggtttggaattagtgatcagtttatgtatatcgcaactaccgggcatatggctatcgacatcgagaacattacccacatgataagagattgtatcagtttcgtagtcttgagtattggtattactatatagtatatagatgtcgcccactagagttactgtctccgaatgcggcatgatagtatcattctttgctttcgttaactgtttggaggaagaatctttgttattgcatttaatctcgaaattcagagtgcacacctttctcctgtaaagaaacctgaagtcgctaccttattaagaacggagaagtatccatcacgaaagacgggattacagtctttatgattcatagtaatagttagttccgacgttgagatggattcgctgagaccggtagtggtcgtccgagtacacgacgtgtcgttaactggatacaggttaatttccacatcgatatagttaaacgtatttctgggtacgggttcgcatttatctgcggaagagacggtgtgagaatatgttccgagaccacacggagaacagatgacgtctccggatactccgtatcctattccacattttgtttgggaaacacatgccttgcatccggatgatcctttgagaagacaataatatccgggagagcattcacagattctattgtgagtcgtgttacacgatcgcgtcttccgttacaacttagacaagcgggtaaatgattattgcgagatgtgaaggtacccgaaccacacggcgtacattgtgtgttagtcttgctatcgcataatctggaagcgtatgttcccggacacaaattatggcgtttgtattcgttgtctttacactttccatcggatggtgcatgcggtgctatatctcttccgtttattattatacatgagagaaacaatatatacgagtataatacggacttcatgatttaataatgtagtaatcgttgtcttgttcctgtttcctacttctccaatcatatagatattttctttctatcatggataatatttgtaatggttctttccgtacaacatactgtttagatgatattgcgcataatttccggaggcaaatacgatagtctagattgaccgatggtagactctaatttattgagtgctttgtcgacgagtttacttttacgctccatcgatagatggcactgttctatgagatcgtcgtacatgggaaatgaaatgtgactgtctgaatgtatggctttaagatagctgtgataccgtatacaggtcggtgtcggagattcgaatctctttgaggcgacttatgtcacgatgatggaatctatcttatcgaatgatatatttttcataaatacacttttatagtcctcgtttaaacagaatttactatgtagttccgcgaatgactcgtcccttaataggcagtaggctagtatcttttttacgtagtaatcgtcgtagggagagacatcttgtagaacaacgatttaatcataggtagagatactttcagtctgtggtggatgatgtcattcacaacatccgccttgtatatgatgtttctgttttcaaacaccaagtcgaataccgtctttagtcggaaggttgatgtcgtatccgatgtatgaggcaacattgttgttacaattttgaaaggcggtattatagtattcgtctttctgaatgtcgaacctatctaatagataccgtagtatattgagagtgtatccttgattatgttttatgaatagataaagtagatgttgtccttcttccttttgttcgtgccaattgagtaacattatgagaatatgacctgttgcacaatcgttccatgatgggtgtacaatcaagattattacgtatcctcgtatcggctcctcgagataaaagagcatacaccacacgaggactatgtttggtatactgttgaaggtaagtgtgtaaccgcgttaatgtttgctccataatctattatcgcgtagatgaatcgcttctcggctcgcatcttagtgtgacttgacttgtaataattgctttcgtagaacgtggatatgtgtttacagtagtaatgaagagaagtgagttcatcctcgtcggcgcaattagggtcggatcctttgtacagaacgtaatagtttaagctcccattgaatttatatctaagataacacagcaatagatcggatgatttactaaagtcatcaatggtgtccgttagtatatcaaagatcttgttatcgattgatagtggtcatccttgctatcaaagttacgcatgccgtggtgtaacaatatctttaatacagatggattaaatcgtgtattcatcgtatagcaatgtaatggagagttacctcgtttattcagatcgcagtgtttaataactagcttaaacagatgagacgatgtatctacatcaaagaacgtaaaatacatatgacagacattgttgacagaaacgtgaccttcattcttaccgtcgtccataaatacgttaggtatgtaccacatactgtcgcgaacgatgcgtacaatctcgtccatctcataatgatttactttttcataattaaagatgtgaaagaaaaaccgaacaatatatttttttagtaatgtttatgcgagacatataaaataaactccgtgtttatgatgccggtaaatgtttttatcatcttggacggaatcgattttgtaatatgtcatggaaacaaatgaaacaggacattatcgctccatgataaattatttaatggagtaataaagtatctccatgggtaatttcgaaatcaagttatcgtctgtattaatgttgtccactatggagtcgatcctctcattgttctttacagtttctgtaatgatggacgttagttcttttttgtaccatttgatgtcggattctttgcgtatctcaatctgtggcgtttgcttcgtttaaataatatatcaaacatggaaacgcctgatatgtagacattcttcattctattaatgtctactctatagcgctttagttccttatgacgaccggcgatatcatactttactttagaaggaaaatcatcatctaggattaaggcgtatctgatacaggcgaataatggttcaggatatagatagcgtatatctctattaaatgcgtcaatcatagtctctagagtgggatggtaactcagtaataaatcaactagcttcgttttgttttctctttggtaactgcttttctggatggccgtattgattatcgagcgtgacactcgctccatattccaataaccgctttgcaaattgtatattattgacatcgaccgcgtaatatagtagagttatcgatcatatctatatcatccatgtacttgcttagtatatcaaatacatctatcagtatggtttcataacagtgatacccgcaattattaaatctcgataatatcagaccgtacatacatagacggccattgttcgatacgtgatttacagccgcgtgtccatattttccacgataaaccttacgacgtttacatcgacgagattattattaacaaagtagtcgtgtagaggatagttgttgtccgtcgtcttatccatggttgctccgttatccaacatgcatcgaacgaccatatcgccgtaatgtaagtagtttatcagtatggcttgtacatcctgttgtctaaatctctttagaatgttatcgatgatgtagtggttatattctctggaatcgtacgaagtaatactacgcattacgtcgacaagagtatgacgtctctcaataagaagattaacgatttccatgtctacattatatggggttactctaaatcgcttgtttagataatacgcctctaatatagggctgacgtcgtatactctacacgtgtccacatcctttattaataataatttaacaatctctatatctatggttgagaaagaccagtagtattggatgggtaaagatcctccttcgtctctgccatggatggaaacattgttatcgatcaaacatttaattacatccttggatagagattgagattctctatgagacgatatatagtaatgaagagagttcttacacatatcactgtcgtacatacaggtacgaaatacgtaaccggtgctgtaacattctgatttaagaagccatagcaatacttctggtctcggattaggcgtcgttacgtatatatccaccaatccgagaccattgattgcataattcgtattcttggacggacgtatccgtttatccacaattaggtattttagcagacgtaagtcgatattatccgaatacagatcgaaatcatttatattcgacttgagttcgttagaggaattcgaatagctggatatcagtagatgcacaatttgagatttgacgtatctatgcttactgtatactcctagcggagttaatccttcgttgtttctacaaagtctctcgactccgcgagagaacaatcttaatgtctgtatcgcatttattggagacgtaacaatgtagcgcattgtttcctcgtctatctatatgttttgataagttgtgacacgtttcaatttctagttttatttttttgtacgtcacatcttcatccagtagacgacatagaatagtgcactctctaccacaataatccatagctattctggtgctaattattcctatttcacgaaggcaatcattcctcataagatgataaaaagtgtagtgagagagcatgaaggagatttagtatttagcagtgcggatatgatccaagagggtgagatagtcgttctcgttcagaatctttcgcagcataagtagtatgtcgatatacttatcgttgaagactctttataaaagtctatttgtttatatttattgcggatagcagtatttccctataaaaagtatacgtcctgtggtgtctttaatcatgtacatgaatggatggtttatgtagaccttcgtacgatataccatcgaaaagttaatcgtaaatactcctgtaacggccgatgcttctgtatactcctcattaacatctataaacgtcgtatgtagaaatttttctacagtgatagtttcattacacatcttgctaaaatctgcataatatccgaatatattagtaagtcctaaattttctaaaatcggtaccagattatacggttctgtcatttccactttaaactttggcatatacaagtctatacttttagtagataacataccacaccattttttaaatttttcatctgttatatttttttctatgttatatataccttctatgtcgtccggtagtataattaccatactagagtttccctcgtatggaatatcgataatagagaatcctccgaataattcattaatatgtacatattgcaagttattctcggtacccaccatcatatcaacgctggtaactatattcttagaaatataaaacttgtctgtatatgtaagatgtttagaaaatggatatttccacattgctttaaaatggacggcgctaacaactgtcatacgagtattaatggatagcggactagtcaataaggaattaattttaccatttgtcattgtcttaacccattcgttgattagttcctttgtttggttagcattattaaagtttacagtttgaaaatcgtcttttattttttgtaggaaggaggcgtggaactcgatactatcgctaccgtatattttatttgcggtagctagtgtcgcacaatacggaatatctacctccatgtcatcattattgtcatcgggtgtattctcattcatattctctatatattttgatagttgttcagctgtagaaccagctgctccatgatttagaatagataaagtagataaaatggaaactggagaaatcaaaacattttcatcagggtgttttacgattagttctttaaagatatccatggtatagacctaacgataacgatatatatcataaataaataatgttaaatttcagtttatgtttgtaccccgtattcatacttaacaaattggtattgcgtacacaatcaatcatattacataccattaataatgcaagcataaaaaatcgttagtagatgtttctaaatataggttccgtaagcaaagaatataagaatgaagcggtaatgataaaatcaatcgttatctaaaatgatcatactcatttattttattctattatattaacacatacatttttaacagcaacacattcaatattgtattgttatttttatattatttacacaattaacaatatattattagtttatattactgaattaataatataaaattcccaatcttgtcataaacacacactgagaaacagcataaacacagaatccatcaaaaatgttgataaattatctgatgttgttgttcgctgctatgataatcagatcattcgccgatagtggtaacgctatcgaaacgacattgccagaaattacaaacgctacaacagatattccagctatcagattatgcggtccagagggagatggatattgtttacacggtgactgtatccacgctagagatattgacggtatgtattgtagatgctctcatggttatacaggcattagatgtcagcatgtagtattagtagactatcaacgttcagaaaacccaaacactacaacgtcatatatcccatctcccggtattatgcttgtattagtaggcattattatgtgttgtctattatctgtttataggttcactcgacgaactaaactacctatacaagatatggttgtgccataatttttataaatttttttatgagtatttttacaaaaatgtataaagtgtatgtcttatgtatatttataaaaatgctaagtatgcgatgtatctatgttatttgtatttatctaaacaatacctctacctctagatattatacaaaaattttttatttcggcatattaaagtaaaatctagttaccttgaaaatgaatacagtgggtggttccgtatcaccagtaagaacataatagtcaaatacagtatccgattgagattttgcatacaatactagtctagaaagaaatttgtaatcatcttctgtgacgggagtccatatatctgtatcatcgtctagtttatcagtgtcccatgctatattcctgttatcatcattagttaatgaaaataactctcgtgcttcagaaaagtcaaatattgtatccatacatacatctccaaaactatcgcttatacgtttatctttaacgatacctatacctagatggttatttactaacagacattttccagatctattgactataactcctatagtttccacatcaaccaagtaatgatcatctattgttatataacaataacataactcttttccatttttatcagtatgtatatctatatcaacgtcgtcgttgtagtgaatagtagtcattgatctattatatgaaacggatatgtctagaacggcaattgttttacgtccagttaacactttctttgatttaaagtctagagtctttgcaaacataatatccttatccgactttatatttcctgtagggtggtataattttattttgcctccacatatcggtgtttccaaatatattactagacaatattccatatagttattagttaagggtacccaattagaacacgtacgcttattatcatcatttggatcgtatttcataaaagttattgtgttatcgatgtcaacacattctacattttttaatcgtctatatagtatttttctgatattttctataatatcagaattgtcttccatcggaagttgtatactatcggaatcagttacatgtttaaataattctctgatgtcattccttatacaatcaaattcattattaaacagtttaatagtctgtagacctttatcgtcgtaaatatccattgtcttattagttacgcttatttttatgtgtttttacgttgctttattatattttataagaatgattgtttgacgaatcacgagaactattaagacacattattaggtatatattataaaaaagtttttgattacgatgttataagaggaaagaggacacattaacatcatacatcaattaactacattcttataacatcgtaatcaaaagaattgcaattttgatgtataacaactgtcaatgggttatggaattgtatattacatattatacggtatgttggtaacgacaaataccggtcggtaattgtctgccggtgtaatagaattatatatatctatctattacaccggccttgtatacataataataagttgtggtagtatgatctccatatttataatttaggactttgtattcagtatttttggaatcataaaaaataaaaaaaagttttactaatttaaaatttaaaaagtatttacatttttttcactgtttagtcgcggatatggaattcgatcctgccaaaatcaatacatcatctatagatcatgtaacaatattacaatacatagatgaaccaaatgatataagactaacagtatgcattatccgaaatattatatcaatatcacaaaaataaatacacatttggctaatcaatttcgggcttggaaaaaacgtatcgccggaagggactatatgactaacttatctagagatacaggaatacaacaatcaaaacttactgaaactatacgtaactgtcaaaaaaatagaaacatatatggtctatatatacactacaatttagttattaattggataaccgatgtgattatcaatcaatattaagagggttggtaaattggtacatagctaataatacctatacacccaataatacaacaaccatttctgagttggatatcatcaaaatactaaataaatacgaggacgtgtatagagtaagtaaagaaaaagaatgtggaatttgctatgaagttgtttactcaaaacgatagatactttggtttattggattcgtgtactcatatattttgcataacatgcatcaatatatggcataaaacacgaagagaaaccggtgcgtcggataattgtcctatatgccgtacccgttttagaaacataacaatgagcaagttctataagctagttaactaataaataaaaagtttaatttgttgacgacgtatgtcgttattttttctcgtataaaagattaatttgattctaatataatctttagtattggataaatatcaattcaaattaattccattagattatatcataaataaaaatagtagcacacaactacttcagcaaacattctttttataaatgccatctagcgtagcgaggacacaagtgaacctataattatcaaatttattagtatcagtcacatgaaggactttacgtagagtgacgattccactatctgtggtacgaacggtttcatcttctttgatgccatcacccagatgttctataaacttggtatcctcgtccgatctcatatcctttgccaaccaatacatgtagctaaaattaggcataaatttcacacatcctgaacaatgaaattctccagaagatgttacaatgtctagatttggacatttggtttcaaccgcgttaacatatgagtgaacacacccatacatgaaagcgatgagaaataggattctcatcttgccaaaatatcactagaaaaaatttatttatcagttttaaaggtataaaaaatacttattgttgctcgaatattttgtatttgatggtatacggaagattagaaatgtaggtattatcatcaactgattctatggttttatgtattctatcatgtttcactattgcgttggaaataatatcatatgcttccacatatattttattttgttttaactcataatactcacgtaattctggattattggcatatctatgaataattttagctccatgatcagtaaatattaatgagaacatagtattaccacctaccattatttttttcatctcattcaattcttaattgcaaagatctatataatcattatagcgttgacttatggactctggaatcttagacgatgtacagtcatctataatcatggcatatttaatacattgttttatagcatagtcgttatctacgatgttagatatttctctcaatgaatcaatcacacaatctaatgtaggtttatgacataatagcattttcagcagttcaatgtttttagattcgttgatggcaatggctatacatgtatatccgttatttgatctaatgttgacatctgaaccggattctagcagtaaagatactagagattgtttattatatctaacagccttgtgaagaagtgtttctcctcgtttgtcaatcatgttaatgtctttaagataaggtaggcaaatgtttatagtactaagaattgggcaagcataagacatgtcacaaagacccttttttgtatgtataagtgtaaaaattataacatccatagttggatttacataggtgtccaatcgggatctctccatcatcgagataattgatggcatctcccttccttttttagtagatatttcatcgtgtaagaatcaatattaatatttctaaagtatccgtgtatagcctctttatttaccacagctccatattccactagagggatatcgccgaatgtcatatactcaattagtatatgttggaggacatccgagttcattgttttcaatatcaaagagatggtttccttatcatttctccatagtggtacaatactacacattattccgtgcggctttccattttccaaaaacaatttgaccaaatctaaatctacatctttattgtatctataatcactatttagataatcagccataattcctcgagtgcaacatgttagatcgtctatatatgaataagcagtgttatctattcctttcattaacaatttaacgatgtctatatctatatgagatgacttaatataatattgaagagctgtacaatagtttttatctataaaagacggcttgattccgtgattaattagacatttaacaacttccggacgcacatatgctctcgtatccgactctgaatacagatgagagatgatatacagatgcaatacggtaccgcaatttcgtagttgataatcatcatacgcgtatcagtactcgtcctcataaagaacactgcagccattttctatgaacaaatcaataattttagaaacaggatcattgtcattacataattttctataactgaacgatggttttcacatttaacactcaagtcaaatccatgttctaccaacacctttatcaagtcaacgtctacatttttggatttcatatagctgaatatattaaagttatttatgttgctaaatccagtggcttctagtagagccatcgctatatccttattaactttaacatgtctactatttgtgtattcttctaatggggtaagctgtctccaatttttgcgtaatggattagtgccactgtctagtagtagtttgacgacctcgacattattacaatgctcattaaaaaggtatgcgtgtaaagcattattcttgaattggttcctggtatcattaggatctctgtctttcaacatctgtttaagttcatcaagagccacctcctcattttccaaatagtcaaacattttgactgaatgagctactgtgaactctatacacccacacaactaatgtcattaaatatcatgtcaaaaacttgtacaattattaataaaaataatttagtgtttaaattttaccagttccagattttacacctccgttaatacctccattaaccccactggacgatcctcctccccacattccaccgccaccagatgtataagttttagatcctttattactaccatcatgtccatggataaagacactccacatgccgccactaccccctttagaagacatattaataagacttaaggacaagtttaacaataaaattaatcacgagtaccctactaccaacctacactattatatgattatagtttctatttttacagtaccttgactaaagtttctagtcacaagagcaatactaccaacctacactattatatgattatagtttctatttttataggaacgcgtacgagaaaatcaaatgtctaatttctaacggtagtgttgataaacgattgttatccgcggatacctcctctatcatgtcgtctattttcttactttgttctattaacttattagcattatatattatttgattataaaacttatattgcttattagcccaatctgtaaatatcggattattaacatatcgtttctttgtaggtttatttaacatgtacatcactgtaagcatgtccttaccatttattttaatttgacgcatatccgcaatttctttttcgcagtcggttataaattctatatatgatggatacatgctacatgtgtacttataatcgactaatatgaagtacttgatacatattttcagtaacgatttattattaccacctatgaataagtacctgtgatcgtctaggtaatcaactgttttcttaatacattcgatggttggtaatttactcagaataatttccaatatcttaatatataattctgctatttctgggatatatttatctgccagtataacacaaatagtaatacatgtaaacccatattttgttattatattaatgtctgcgccattatctattaaccattctactaggctgacactatgcgactcaatacaatgataaagtatactacatccatgtttatctattttgtttatatcatcaatatacggcttacaaagttttagtatcgataacacatccaactcacgcatagagaaggtagggaataatggcataatatttattaggttatcatcattgtcattatctacaactaagtttccattttttaaaatatactcgacaactttaggatctctattgccaaatttttgaaaatatttatttatatgcttaaatctatataatgtagctccttcatcaatcatacatttaataacattgatgtatactgtatgataagatacatattctaacaatagatcttgtatagaatctgtatatcttttaagaattgtggatattaggatattattacataaactattacacaattctaaaatataaaacgtatcacggtcgaataatagttgatcaactatataattatcgattttgtgatttttcttcctaaactgtttacgtaaatagttagatagaatattcattagttcatgaccactatagttactatcgaataacgcgtcaaatatttcccgtttaatatcgcatttgtcaagataataatagagtgtggtatgttcacgataagtataataacgcatctctttttcgtgtgaaattaaatagtttattacgtccaaagatgtagcataaccatcttgtgacctagtaataatataataatagagaactgttttacccattctatcatcataatcagtggtgtagtcgtaatcgtaatcgtctaattcatcatcccaattataatattcaccagcacgtctaatctgttctattttgatcttgtatccatactgtatgttgctacatgtaggtattcctttatccaataatagtttaaacacatctacattgggatttgatgttgtagcgtatttttctacaatattaataccatttttgatactatttatttctatacctttcgaaattagtaatttcaataagtctatattgatgttatcagaacatagatattcgaatatatcaaaatcattgatatttttatagtcgactgacgacaataacaaaatcacaacatcgtttttgatattattatttttcttggtaacgtatgcctttaatggagtttcaccatcatactcatataatggatttgcaccactttctatcaatgattgtgcactgctggcatcgatgttaaatgttttacaactatcatagagtatcttatcgttaaccatgattggttgttgatgctatcgcattttttggtttctttcatttcagttatgtatggatttagcacgtttgggaagcatgagctcatatgatttcagtactgtagtgtcagtactattagtttcaataagatcaatctctagatctatagaatcaaaacacgataggtcagaagataatgaatatctgtaggcttcttgttgtactgtaacttctggttttgttagatggttgcatcgtgctttaacgtcaatggtacaaattttatcctcgctttgtgtatcatattcgtccctactataaaattgtatattcagattatcatgcgatgtgtatacgctaacggtatcaataaacggagcacaccatttagtcataaccgtaatccaaaaatttttaaagtatatcttaacgaaagaagttgtgtcattgtctacggtgtatggtactagatcctcataagtgtatatatctagagtaatgtttaatttattaaatggttgataatatggatcctcgtgacaatttccgaagatggaaataagacataaacacgcaataaatctaattgcggacatggttactccttaaaaaaatacgaataatcaccttggctatttagtaagtgtcatttaacactatactcatattaatccatggactcataatctctatacgggattaacggatgttctatatacggggatgagtagttctcttctttaactttatactttttactaatcatatttagactgatgtatgggtaatagtgtttgaagagctcgttctcatcatcagaataaatcaatatctctgtttttttgttatacagatgtattacagcctcatatattacgtaatagaacgtgtcatctaccttattaactttcaccgcatagttgtttgcaaatacggttaatcctttgacctcgtcgatttccgaccaatctgggcgtataatgaatctaaactttaattgcttgtaatcattcgaaataatttttagtttgcatccgtagttatcccctttatgtaactgtaaatttctcaacgcgatatctccattaataatgatgtcgaattcgtgctgtatacccatactgaatggatgaacgaataccgacggcgttaatagtaatttactttttcatctttacatattgggtactagttttactatcataagtttataaattccacaagctactatggaataagccaaccatcttagtataccacacatgtcttaaagtttattaattaattacatgttgttttatatatatcgctacgaatttaaagagaaattagtttaggaagaaaaattatctatctacatcatcacgtctctgtattctacgatagagtgctactttaagatgcgacagatccgtgtcatcaaatatatactccattaaaatgattattccggcagcgaacttgatattggatatatcacaacctttgttaatatctacgacaatagacagcagtcccatggttccataaacagtgagtttatctttctttgaagagatattttgtagagatcttataaaactgtcgaatgacatcgcatttatatctttagctaaatcgtatatgttaccatcgtaatatctaaccgcgtctatcttaaacgtttccatcgctttaaagacgtttccgatagatggtctcatttcatcagtcatactgagccaacaaatataatcgtgtataacatctttgatagaatcagactctaaagaaaacgaatcggctttattatacgcattcatgataaacttaatgaaaaatgtttttcgttgtttaagttggatgaatagtatgtcttaataattgttattatttcattaattaatatttagtaacgagtacactctataaaaacgagaatgacataactaatcataactagttatcaaagtgtctaggacgcgtaattttcatatggtatagatcctgtaagcattgtctgtattctggagctattttctctatcgcattagtgagttcagaatatgttataaatttaaatcgaataacgaacataactttagtaaagtcgtctatattaactcttttattttctagccatcgtaataccatgtttaagatagtatattctctagttactacgatctcatcgttgtctagaatatcacatactgaatctacatccaattttagaaattggtctgtgttacatatctcttctatattattgttgatgtattgtcgtagaaaactattacgtagaccattttctttataaaacgaatatatagtactccaattatctttaccgatatatttgcacacataatccattctctcaatcactacatctttaagattttcgttgttaagatatttggctaaactatataattctattagatcatcaacagaatcagtatatatttttctagatccaaagacgaactctttggcgtcctctataatattcccagaaaagatattttcgtgttttagtttatcgagatctgatctgttcatatacgccatgattgtacggtacgttatgataaccgcataaaataaaaatccattttcatttttaaccaatactattcataattgagattgatgtaatactttgttactttgaacgtaaagacagtacacggatccgtatctccaacaagcacgtagtaatcaaatttggtgttgttaaacttcgcaatattcatcaatttagatagaaacttatactcatcatctgttttaggaatccatgtattattaccactttccaacttatcattatcccaggctatgtttcgtccatcatcgttgcgcagagtgaataattcttttgtattcggtagttcaaatatatgatccatgcatagatcggcaaagctattgtagatgtgatttttcctaaatctaatataaaactcgtttactagcaaacactttcctgatttatcgaccaagacacatatggtttctaaatctatcaagtggtggggatccatagttatgacgcagtaacatatattattacattcttgactgtcgctaatatctaaatatttattgttatcgtattggattctgcatatagatggcttgtatgtcaaagatatagaacacataaccaatttatagtcgcgctttacattctcgaatctaaagttaagagatttagaaaacattatatcctcggatgatgttatcactgtttctggagtaggatatattaaagtctttacagatttcgtccgattcaaataaatcactaaataatatcccacattatcatctgttagagtagtatcattaaatctattatattttatgaaagatatatcactgctcacctctatatttcgtacatttttaaactgtttgtataatatctctctgatacaatcagatatatctattgtgtcggtagacgataccgttacatttgaattaatggtgttccattttacaacttttaacaagttgaccaattcatttctaatagtatcaaactctccatgattaaatattttaatagtatccattttatatcactacggacacaaagtagctgacataaaccattgtataatttttatgttttatgtttattagcgtacacattttggaagttccggcttccatgtatttcctggagagcaagtagatgatgaggaaccagatagtttatatccgtacttgcacttaaagtctacattgtcgttgtatgagtatgatcttttaaacccgctagacaagtatccgtttgatattgtaggatgtggacatttaacaatctgacacgtgggtggatcggaccattctcctcctgaacacaggacactagagttaccaatcaacgaatatccactattgcaactataagttacaacgctcccatcggtataaaaatcctcgtatccgttatgtcttccgttggatatagatggaggggattggcatttaacagattcacaaataggtgcctcgggattccataccatagatccagtagatcctaattcacaatacgatttagattcaccgatcaactgatatccgctattacaagagtacgttatactagagccaaagtctactccaccaatatcaagttggccattatcgatatctcgaggcgatgggcatctccgtttaatacattgattaaagagtgtccatccagtacctgtacatttagcatatataggtcccattttttgctttctgtatccaggtagacatagatattctatagtgtctcctatgttgtaattagcattagcatcagtctccacactattcttaaatttcatattaatgggtcgtgacggaatagtacagcatgatagaacgcatcctattcccaacaatgtcaggaacgtcacgctctccaccttcatatttatttatccgtaaaaatgttatcctggacatcgtacaaataataaaaagcccatatatgttcgctattgtagaaattgtttttcacagttgctcaaaaacgatggcagtgacttatgagttacgttacactttggagtctcatctttagtaaacatatcataatattcgatattacgagttgacatatcgaacaaattccaagtatttgattttggataatattcgtattttgcatctgctataattaagatataatcaccgcaagaacacacgaacatctttcctacatggttaaagtacatgtacaattctatccatttgtcttccttaactatatatttgtatagataattacgagtctcgtgagtaattccagtaattacatagatgtcgccgtcgtactctacagcataaactatactatgatgtctaggcatgggagacttttttatccaacgatttttagtgaaacattccacatcgtttaatactacatatttttcatacgtggtataaactccacccattacatatatatcatcgtttacgaataccgacgcgcctgaatatctaggagtaattaagtttggaagtcttatccatttcgaagtgccgtgtttcaaatattctgccacacccgttgaaatagaaaattctaatcctcctattacatataactttccatcgttaacacaagtactaacttctgattttaacgacgacatattagtaaccgttttccattttttcgttttaagatctacccgcgatacggaataaacatgtctattgttaatcatgccgccaataatgtatagacaattatgtaaaacatttgcattatagaattgtctatctgtattaccgactatcgtccaatattctgttctaggagagtaatgggttattgtggatatataatcagagtttttaatgactactatattatgttttataccatttcgtgtcactggctttgtagatttggatatagttaatcccaacaatgatatagcattgcgcatagtattagtcataaacttgggatgtaaaatgttgatgatatctacatcgtttggatttttatgtatccactttaataatatcatagctgtaacatcctcatgatttacgttaacgtcttcgtgggataagatagttgtcagttcatcctttgataattttccaaattctggatcggatgtcaccgcagtaatattgttgattatttctgacatcgacgcattatatagttttttaattccatatcttttagaaaagttaaacatccttatacaatttgtgaaattaatattatgaatcatagtttttacacatagatctactacaggcggaacatcaattattatggcagcaactagtatcatttctacattgtttatggtgatgtttatcttcttccagcgcatatagtctaatagcgattcaaacgcgtgatagtttataccattcaatataatcgcttcatcctttagatggtgatcctgaatgcgtttaaaaaaattatacggagacgccgtaataatttccttattcacttgtataatttccccattgatagaaaatatcacgctttccattcttaaagtactataagtaattatagtataatgtaaacgtttatatattcaatatttttataaaaatcattttgacattaattcctttttaaatttccgtctatcatctatagaaacgtattctatgaatttataaaatgcttttacgtgtcctatcgtaggcgatagaaccgctaaaaagcctatcgaatttctacaaaagaatctgttatatggtatagggagagtataaaacattaaatgtccgtacttattaaagtattcagtagccaatcctaactctttcgaatacttattaatggctcttgttctgtacgaatctatttttttgaacaacggacctagtggtatatcttgttctatgtatctaaaataatgtctgactagatccgttagtttaatatccgcagtcatcttgtctagaatggcaaatctaactgcgggtttaggctttagtttagtttctatatctacatctatgtctttatctaacaccaaaaatataatagctaatattttattacaatcatccggatattcttctacgatctcactaactaatgtttctttggttatactagtatagtcactatcggacaaataaagaaaatcagatgatcgatgaataatacatttaaattcatcatctgtaagatttttgagatgtctcattagaatattattagggttagtactcattatcattcggcagctattacttattttattatttttcaccatatagatcaatcattagatcatcaaaatatgtttcaatcatcctaaagagtatggtaaatgactcttcccatctaatttctgaacgttcaccaatgtctctagccactttggcactaatagcgatcattcgcttagcgtcttctatattattaactggttgattcaatctatctagcaatggaccgtcggacagcgtcattctcatgttcttaatcaatgtacatacatcgccgtcatctaccaattcatccaacaacataagctttttaaaatcatcattataataggtttgatcgttgtcatttctccaaagaatatatctaataagtagagtcctcatgcttagttaacaactattttttatgttaaatcaattagtacaccgctatgtttaatacttattcatattttagtttttaggattgagaatcaatacaaaaattaatgcatcattaattttagaaatacttagtttccacgtagtcaatgaaacatttgaactcatcgtacaggacgttctcgtacaggacgtaactataaaccggtttatatttgttcaagatagatacaaatccgataactttttttacgaattctacgggatccactttaaaagtgtcataccgggttctttttatttttttaaacagatcaatggtgtgatgttgattaggtcttttacgaatttgatatagaatagcgtttacatatcctccataatggtcaatcgccatttgttcgtatgtcataaattctttaattatatgacactgtgtattatttagttcatccttgttcattgttaggaatctatccaaaatggcaattatactagaactataggtgcgttgtatacacatattgatgtgtctgtttatacaatcaatgctactaccttcgggtaaaattgtagcatcatataccatttctagtactttaggttcattattatccattgcagaggacgtcatgatcgaatcataaaaaaatatattatttttatgttattttgttaaaaataatcatcgaatacttcgtaagatactccttcatgaacataatcagttacaaaacgtttatatgaagtaaagtatctacgatttttacaaaagtccggatgcataagtacaaagtacgcgataaacggaataataatagatttatctagtctatctttttctatagctttcatagttagatacatggtctcagaagtaggattatgtaacatcagcttcgataaaatgactgggttatttagtcttacacattcgctcatacatgtatgaccgttaactacagagtctacactaaaatgattgaacaatagatagtctaccattgtttcgtattcagatagtacagcgtagtacatggcatcttcacaaattatatcattgtctaatagatatttgacgcatcttatggatcccacttcaacagccatcttaaaatcggtagaatcatattgctttcctttatcattaataatttctagaacatcatctctatcataaaagatacaaatattaactgtttgatccgtaataacattgctagtcgatagcaatttgttaataagatgcgctgggctcaatgtcttaataagaagtgtaagaggactatctccgaatttgttttgtttattaacatccgttgatggaagtaaaagatctataatgtctacattcttgactgttttagagcatacaatatggagaggtgtatttccatcatgatctggttttgagggactaattcctagtttcatcatccatgagattgtagaagcttttggattgtctgacataagatgtctatgaatatgatttttgccaaatttatccactatcctggcttcgaatccgatggacattatttttttaaacactctttctgaaggatctgtacacgccaacaacggaccacatccttcttcatcaaccgagttgttaatcttggctccatactgtaccaataaatttattctctctatgacttcatcatctgttcccgagagataatatagaggcgttttatgctgtttatcacacgcgtttggatctgcgccgtgcgtcagcagcatcgcgactattctattattattaattttagaagctatatgcaatggataatttccatcatcatccgtctcatttggagagtatcctctatgaagaagttcttcgacaaatcgttcatctagtcctttaattccacaatacgcatgtagaatgtgataattatttccagaaggttcgatagcttgtagcatattcctaaatacatctaaatttttactattatatttggcataaagagatagataatactcggccgacataatgttgtccattgtagtataaaaattaatatttctatttctgtatatttgcaacaatttactctctataacaaatatcataacttagttcttttatgtcaagaaggcactggtttagttcatctataaatgtcacgccataactaccacgcatgccatactcagaattatgataaagatatttatccttggggtgtaggtaatggggattaatctttgttggatcagtctctaagttaacacatgtcacacatgatccatttatagttatatcacacgatgatgatttatgaattgattccggaagatcgctatcgtattttgtggttccacaattcatttccatacatgttattgtcacactaatattatgatgaactttatctagccgctgagtggtaaacaacagaacagatagtttattatctttaccaacaccctcagccgctgccacaaatctctgatccgtatccatgatggtcatgtttatttctagtccgtatccagtcaacactatgttagcatttctgtcgatatagctttcactcatatgacactcaccaataatagtagaattaatgtcgtaatttacaccaatagtgagttcggcggcaaagtaccaataccggtaatcttgtcgaggaggacatatagtattcttgtattctaccgaatacccgagagatgcgatacaaaagagcaagactaatttgtaaaccatcttactcaaaatatgtaacaatagtacgatgcaatgagtaagacaataggaaatctatcttatatacacataattattctatcaattttaccaattagttagtgtaatgttaacaaaaatgtgggagaatctaattagtttttctttacacaattgacgtacatgagtctgagttccttgtttttgctaattatttcatccaatttattattcttgacgatatcgagatcttttgtataggagtcaaacttgtattcaacatgcttttctataatcattttagctatttcggcatcatccaatagtacattttccagattagcagaatagatattaatgtcgtatttgaacagagcctgtaacatctcaatgtctttattatctatagccaatttaatgtccggaatgaagagaagggaattattggtgtttgtcgacgtcatatagtcgagcaagagaatcatcatatccacgtgtccattttttatagtgatgtgaatacaactaaggagaatagccagatcaaaagtagatggtatctctgaaagaaagtaggaaacaatacttacatcattaagcatgacggcatgataaaatgaagttttccatccagttttcccatagaacatcagtctccaatttttcttaacaaacagttttaccgtttgcatgttaccactatcaaccgcataatacaatgcggtgtttcccttgtcatcaaattgtgaatcatccagtccactgaatagcaaaatctttactattttggtatcttccaatgtggctgcctgatgtaatggaaattcattctctagaagatttttcaatgctccagcgttcaacaacgtacatactagacgcacgttattatcagctattgcataatacaaggcactatgtccatggacatccgccttaaatgtatctttactagagagaaagcttttcagctgcttagacttccaagtattaattcgtgacagatccatgtctgaaacgagacgctaattagtgtatattttttcattttttataattttgtcatattgcaccagaattaataatatctttaatagatctgattagtagatacatggctatcgcaaaacaacatatacacatttaataaaaataatatttattaagaaaattcagatttcacgtacccatcaatataaataaaataatgattccttacaccgtacccatattaaggagattccaccttacccataaacaatataaatccagtaatatcatgtctgatgatgaacacaaatggtgtattaaattccagtttttcaggagatgatctcgccgtagctaccataatagtagatgcctctgctacagttccttgttcgtcgacatctatctttgcattctgaaacattttataaatatataatgggtccctagtcatatgtttaaacgacgcattatctggattaaacatactaggagccatcatttcggctatcgacttaatatccctcttattttcgatagaaaatttagggagtttaagattgtacactttattccctaattgagacgaccaatagtctaattttgcagccgtgatagaatctgtgaaatgggtcatattatcacctattgccaggtacatactaatattagcatccttatacggaaggcgtaccatgtcatattctttgtcatcgattgtgattgtatttccttgcaatttagtaactacgttcatcatgggaaccgttttcgtaccgtacttattagtaaaactagcattgcgtgttttagtgatatcaaacggatattgccatatacctttaaaatatatagtattaatgattgcccatagagtattattgtcgagcatattagaatctactacattagacataccggatctacgttctactatagaattaattttattaaccgcatctcgtctaaagtttaatctatataggccgaatctatgatattgttgataatacgacggtttaatgcacacagtattatctacgaaactttgataagttagatcagtgtacgtatatttagatgttttcagcttagctaatcctgatattaattctgtaaatgctggacccagatctctttttctcaaatccatagtcttcaataattctattctagtattacctgatgcaggcaatagcgacataaacatagaaaacgaataaccaaacggtgagaagacaatattatcatcttgaatatttttatacgctactataccggcattggtaaatccttgtagacgataggcggacgctgaacacgctaacgatagtatcaataacgcaatcatgattttatggtattaataattaaccttatttttatgttcggtataaaaaaattattgatgtctacacatccttttgtaattgacatctatatatccttttgtataatcaactctaatcactttaacttttacagttttccctaccagtttatccctatattcaacatatctatccatatgcatcttaacactctctgccaagatagcttcagagtgaggatagtcaaaaagataaatatatagagcataatcattctcgtatactctgccctttattacatcacccgcattgggcaacgaataacaaaatgcaagcatcttgttaacgggctcgtaaattgggataaaaattatgtttttattgtcttatatctattttattcaagagaatattcaggaatttctttttccggttgtatctcgtcgcagtatatatcatttgtacattgtttcatattttttaatagtttacaccttttagtaggactagtatcgtacaattcatagctgtattttgaattccaatcacgcataaaaatatcttccaattgttgacgaagacctaatccatcatccggtgtaatattaatagatgctccacatgtatccgtaaagtaatttcctgtccaatttgaggtacctatataggccgttttatcggttaccatatatttggcatggtttaccctagaatacggaatgggaggatcagcatctggtacaataaatagctttacttctatatttatgtttttagattttagcatagcgatagatcttaaaaagtttctcatgataaacgaagatcgttgccagcaactaatcaatagcttaacggatacttgtctgtctatagcggatcttcttaattcatcttctatataaggccaaaacaaaattttacccgccttcgaataaataatagggataaagttcataacagatacataaacgaatttactcgcatttctaatacatgacaataaagcggttaaatcattggttctttccatagtacatagttgttgcggtgcagaagcaataaatacagagtgtggaacgccgcttacgttaatactaagaggatgatctgtattataatacgacggataaaagtttttccaattatatggtagattgttaactccaagataccagtatacctcaaaaatttgagtgagatccgctgccaagttcctattattgaagatcgcaatacccaattccttgacctgagttagtgatctccaatccatgttagcgcttcctaaataaatatgtgtattatcagatatccaaaattttgtatgaagaactcctcctaggatatttgtaatatctatgtatcgtacttcaactccggccatttgtagtctttcaacatcctttaatggtttgttagatttattaacggctactctaactcgtactcctcttttgggtaattgtacaatctcgtttaatattatcgtgccgaaattcgtacccacttcatccgataaactccaataaaaagatgatatatctagtgtttttgtggtattggatagaatttccctccacatgttaaatgtagacaaatatactttatcaaattgcatacctataggaatagtttctgtaatcactgcgattgtattatccggattcattttatttgttaaaagaataatcctatatcacttcactctattaaaaatccaagtttctatttctttcatgactgattttttaacttcatccgtttccttatgaagatgatgtttggcaccttcataaatttttatttctctattacaatttgcatgttgcatgaaataatatgcacctaaaacatcgctaatcttattgtttgttccctggagtatgagagtcgggggggtgttaatcttggaaattatttttctaaccttgttggtagccttcaagacctgactagcaaatccagccttaattttttcatgattgactaatgggtcgtattggtatttataaactttatccatatctctagatactgattctggacatagctttccgactggcgcatttggtgtgatggttcccataagtttggcagctagcagattcagtcttgaaacagcatctgcattaactagaggagacattagaatcattgctgtaaacaagtttggattatcgtaagaggctagctcccatggaatgacccaataagtagatttaatagttaccacgtgctgtaccaaagtcatcaatcatcattttttcaccattacttcttccatgtccaatatgatcatgtgagaatactaaaattcctaacgatgatatgttttcagctagttcgtcataacgtccagaatgtttaccagctccatgacttatgaatactaatgccttaggatatgtaataggtttccaatatttacaatatatgtaatcattgtccagattgaacatacagtttgcactcatgattcacgttatataactatcaatattaacagttcgtttgatgatcatattatttttatgttttattgataattgtaaaaacatacaattaaatcaatatagaggaaggagacggctactgtcttttgtaagatagtcatggcgactaaattagattatgaggatgctgttttttactttgtggatgatgataaaatatgtagtcgcgactccatcatcgatctaatagatgaatatattacgtggagaaatcatgttatagtgtttaacaaagatattaccagttgtggaagactgtacaaggaattgatgaagttcgatgatgtcgctatacggtactatggtattgataaaattaatgagattgtcgaagctatgagcgaaggagaccactacatcaattttacaaaagtccatgatcaggaaagtttattcgctaccataggaatatgtgctaaaatcactgaacattggggatacaaaaagatttcagaatctagattccaatcattgggaaacattacagatttgatgaccgacgataatataaacatcttgatactttttctagaaaaaaaattgaattgatgatataggggtcttcataacgcataattattacgttagcattctatatccgtgttaaaaaaaattatcctatcatgtatttgagagttttatatgtagcaaacatgatagctgtgatgccaataagctttagatattcacgcgtgctagtgttagggatggtattatctggtggtgaaatgtccgttatataatctacaaaacaatcatcgcatatagtatgcgatagtagagtaaacatttttatagtttttactggattcatacatcgtctacccaattcggttataaatgaaattgtcgccaatcttacacccaaccccttgttatccattagcatagtattaacttcgttatttatgtcataaactgtaaatgattttgtagatgccatatcatacatgatattcatgtccctattataatcattactaactttatcacaatatatgttgataatatctatatatgatctagtctttgtgggcaactgtctatacaagtcgtctaaacgttgtttactcatatagtatcgaacagccatcattacatggtcccgttccgttgatagataatcgagtatgttagtggacttgtcaaatctatataccatattttctggaagtggatatacatagtcgtgatcaacattattgctagcctcatcttctatatcctgtactataccattatctatatcatctacataatctatgatattattacacataaacatcgacaacatactattgtttattatctaagtcctgttgatccaaacccttgatctcctctatttgtactatctagagattgtacttcttccagttctggataatatatacgttgatagattagctgagctattctatctccagtatttacattaaacgtacattttccattattaataagaatgactcctatgtttcccctataatcttcgtctattacaccacctcctatatcaatgccttttagtgacagaccagacctaggagctattctaccatagcagaacttaggcatggacatactaatatctgtcttaattaactgtctttctcctggagggatagtataatcgtaagcgctatacaaatcatatccggcagcacccggcgattgcctagtaggagatttagctctgttagtttccttaacaaatctaactggtgagttaatattcatgttgaacataaaactaatattttatttcaaaattatttaccatcccatatattccatgaataagtgtgatgattgtacacttctatagtatctatatacgatccacgataaaatcctcctatcaatagcagtttattatccactatgatcaattctggattatccctcggataaataggatcatctatcagagtccatgtattgctggattcacaataaaattccgcatttctaccaaccaagaataaccttctaccgaacactaacgcgcatgatttataatgaggataataagtggatggtccaaactgccactgatcatgattgggtagcaaatattctgtagttgtatcagtttcagaatgtcctcccattacgtatataacattgtttatggatgccactgctggattacatctaggtttcagaagactcggcatattaacccaagcagcatccccgtggaaccaacgctcaacagatgtgggatttggtagacctcctactacgtataatttattgttagcgggtatcccgctagcatacagtctggggctattcatcggaggaattggaatccaattgtttgatatataatttaccgctatagcattgttatgtatttcattgttcatccatccaccgatgagatatactacttctccaacatgagtacttgtacacatatggaatatatctataatttgatccatgttcataggatactctatgaatggatacttgtatgatttgcgtggttgtttatcacaatgaaatattttggtacagtctagtatccattttacattatttatacctctgggagaaagataatttgacctgattacatttttgataaggagtagcagatttcctaatttatttcttcgctttatataccacttaatgacaaaatcaactacataatcctcatctggaacatttagttcatcgctttctagaataagtttcatagatagataatcaaaattgtctatgatgtcatcttccagttccaaaaagtgtttggcaataaagtttttagtatgacataagagattggatagtccgtattctatacccatcatgtaacactcgacacaatattcctttctaaaatctcgtaagataaagtttatacaagtgtagatgataaattctacagaggttaatatagaagcacgtaataaattgacgacgttatgactatctatatatacctttccagtatacgagtaaataactatagaagttaaactgtgaatgtcaaggtctagacaaaccctcgtaactggatctttatttttcgtgtatttttgacgtaaatgtgtgcgaaagtaaggagataactttttcaatatcgtagaattgactattatattgcctcctatggcatcaataattgttttgaatttcttagtcatagacaatgctaatatattcttacagtacacagtattgacaaatatcggcatttatgtttctttaaaagtcaacatctagagaaaaatgattatctttttgagacataactcccattttttggtattcacccacacgtttttcgaaaaaattagtttttccttccaatgatatattttccatgaaatcaaacggattggtaacattataaatttttttaaatcccaattcagaaatcaatctatccgcgacgaattctatatatgttttcatcatttcacaattcattcctataagtttaactggaagagccgcagtaagaaattcttgttcaatggatactgcatctgttataatagatctaacggtttcttcactcggtggatgcaataaatgtttaaacatcaaacatgcgaaatcgcagtgcagaccctcgtctctactaattagttcgttggaaaacgtgagtccgggcattaggccacgctttttaagccaaaatatggaagcgaatgatccggaaaagaagattccttctactgcagcaaaggcaataagtctctctccataaccggcgctgtcatgtatccacttttgagcccaatcggccttcttttttacacaaggcatcgtttctatggcattaaagagatagtttttttcattactatctttaacataagtatcgatcaaaagactatacatttccgaatgaatgttttcaatggccatctgaaatccgtagaaacatctagcctcggtaatctgtacttctgtacaaaatcgttccgccaaattttcattcactattccgtcactggctgcaaaaaacgccaatacatgttttataaaatatttttcgtctggtgttagtttattccaatcattgatatctttagatatatctacttcttccactgtccaaaatgatgcctctgcctttttatacatgttccagatgtcatgatattggattgggaaaataacaaatctatttggatttggtgcaaggatgggttccataactaaattaacaataacaataaattttttttcagttatctatatgcctgtacttggattttttgtacatcgatatcgccgcaatcactacaataattacaagtattattgatagcattgttattagtactatcataattaaattatctacattcatgggtgctgaataatcgttattatcatcattatcattttgtaattgtgacatcatactagataaatcgtttgcgagattgttgtgggaagcgggcatggaggatgcattatcattattatttaacgccttccatttggattcacaaatgttacgcacattcaacattttatggaaactataattttgtgaaaacaaataacaagaaaactcgtcatcgttcaaatttttaacgatagtaaaccgattaaacgtcgagctaatttctaacgctagcgactctgttggatatgggtttccagatatatatcttttcagttcccctacgtatctataatcatctgtaggaaatggaagatatttccatttatctactgttcctaatatcatatgtggtggtgtagtagaaccattaagcgcgaaagatgttatttcgcatcgtattttaacttcgcaataatttctggttagataacgcactctaccagtcaagtcaatgatattagcctttacagatatattcatagtagtcgtaacgatgactccatcttttagatgcgatactcctttgtatgtaccagaatcttcgtacctcaaactcgatatatttaaacaagttaatgagatattaacgcgttttatgaatgatgatatataaccagaagttttatcctcggtggctagcgctataaccttatcattataataccaactagtgtgattaatatgtgacacgtcagtgtgggtacaaatatgtacattatcgtctacgtcgtattcgatacatccgcatacagccaacaaatataaaatgacaaatactctaacgccgttcgtacccatcttgatgcggtttaataaatgttttgatttcaatttattgtaaaaaaagattcggttttatactgttcgatattctcattgcttatattttcatctatcatctccacacagtcaaatccgtggttagcatgcacctcatcaaccggtaaaagactatcggactcttctatcattataactctagaatatttaatttggtcattattaatcaagtcaattatcttatttttaacaaacgtgagtattttactcattttttataaaaacttttagaaatatacagactctatcgtgtgtctatatcttctttttatatccaatgtatttatgtctgatttttcttcatttatcatatataatggtccaaattctacacgtgcttcggattcatccagatcattaaggttcttataattgtaacatccttctcttccctcttctacatcttccttcttattcttattcttagcgtcacagaatctaccacagcaggatcccatgacgagcgtcatattaaactaatccattttcaattataatatatgattagtaatgaccattaaaataaaaaatattcttcataaccggcaagaaagtgaaaagttcacattgaaactatgtcagtagtatacatcatgaaatgatgatatatatatactctattttggtggaggattatatgatataattcgtggataatcatttttaagacacatttctttattcgtaaatcttttcacgttaaatgagtgtccatattttgcaatttcttcatatgatggcggtgtacgtggacgaggctgctcctgttcttgttgtggtcgccgactgtcgtgtctgcgtttagatccctccattatcgcgattgcgtagatggagtactattttataccttgtaattaaatttttttattaattaaacgtataaaaacgttccgtatctgtatttaagagccagatttcgtctaatagaacaaatagctacagtaaaaataactagaataattgctacacccactagaaaccacggatcgtaatacggcaatcggttttcgataataggtggaacgtatattttatttaaggacttaacaattgtctgtaaaccacaatttgcttccgcggatcctgtattaactatctgtaaaagcatatgttgaccgggcggagccgaacattctccgatatctaatttctgtatatctataatattattaacctccgcatacgcattacagttcttttctagcttggataccgcactaggtacatcgtctagatctattcctatttcctcagcgatagctcttctatccttttccggaagcaatgaaatcacttcaataaatgattcaaccatgagtgtgaaactaagtcgagaattactcatgcatttgttagttattcggagcgcgcaatttttaaactgtcctataacctctcctatatgaatagcacaagtgacattagtagggatagaatgttgagctaatttttgtaaataactatctataaaaagattatacaaagttttaaactctttagtttccgccatttatccagtctgagaaaatgtctctcataataaatttttccaagaaactaattgggtgaagaatggaaacctttaatctatatttatcacagtctgttttggtacacatgatgaattcttccaatgccgtactaaattcgatatctttttcgatttctggatatgtttttaataaagtatgaacaaagaaatggaaatcgtaataccagttatgtttaactttgaaattgttttttattttcttgttaatgattccagccacttgggaaaagtcaaagtcgtttaatgccgatttaatacgttcattaaaaacaaactttttatcctttagatgaattattattggttcattggaatcaaaaagtaagatattatcgggtttaagatctgcgtgtaaaaagttgtcgcaacagggtagttcgtagattttaatgtataacagagccatctgtaaaaagataaactttatgtattgtaccaaagatttaaatcctaatttgatagctaactcggtatctactttatctgccgaatacagtgctaggggaaaaattataatgtttcctctttcatattcgtagttagttctcttttcatgttcgaaaaagtgaaacatgcggttaaaatagtttataacattaatattactgttaataactgccggataaaagtgggatagtaatttcacgaatttgatactgtcctttctctcgttaaacgcctttaaaaaaactttagaagaatatctcaatgagagttcctgaccatccatagtttgtatcaataatagcaacatatgaagaacacgtttatacagagtatgtaaaaatgttaatttatagtttaatcccatggcccacgcacacacgattaattttttttcatctccctttagattgttgtatagaaatttgggtactgtgaactccgccgtagtttccatgggactatataattttgtggcctcgaatacaaattttactacatagttatctatcttaaagactataccatatcctcctgtagatatgtgataaaaatcgtcgtttataggataaaatcgtttatccttttgttggaaaaaggatgaattaatgtaatcattctcttctatctttagtagtgtttccttattaaaattcttaaaataatttaacaatctaactgacggagcccaattttggtgtaaatctaattgggacattatattgttaaaatacaaacagtctcctaatataacagtatctgataatctatggggagacatccattgatattcaggggatgaatcattggcaacacccatttattgtacaaaaagccccaatttacaaacgaaagtccaggtttgatagagacaaacaattaactattttgtctctgtttttaacacctccacagtttttaatttctttagtaatgaaattattcacaatatcagtatcttctttatctaccagagattttactaacttgataaccttggctgtctcattcaatagggtagtaatatttgtatgtgtgatattgatatctttttgaattgtttcttttagaagtgattctttgatggtgccagcatacgaattacaataatgcagaaactcggttaacatgcaggaattatagtaagccaattccaattgttgcctgtgttgtattagagtgtcaatatgagcaatggtgtccttgcgtttctctgatagaatgcgagcagcgattttggcgttatcatttgacgatatttctggaatgacgaatcctgtttctactaactttttggtaggacaaagtgaaacaatcaagaagatagcttctcctcctatttgtggaagaaattgaactcctctagatgatctactgacgatagtatctccttgacagatattggaccgaattacagaagtacctggaatgtaaagccctgaaaccccctcattttttaagcagattgttgccgtaaatcctgcactgtgaccaagatagagagctcctttggtgaatccatctctatgtttcagtttaaccaagaaacagtcagctggtctaaaatttccatctctatctaatacagcatctaacttgatgtcaggaactatgaccggtttaatgttatatgtaacattgagtaaatccttaagttcataatcatcactgtcatcagttatgtacgatccaaacaatgtttctaccggcatagtggatacgaagatgctatccatcagaatgtttccctgattagtattttctatatagctattcttctttaaacgattttccaaatcagtaactatgttcatttttttaggagtaggacgcctagccagtatggaagaggattttctagatcctctcttcaacatctttgatctcgatggaatgcaaaaccccatagtgaaacaaccaacgataaaaataatattgtttttcactttttataattttaccatctgactcatggattcattaatatctttataagagctactaacgtataattctttataactgaactgagatatatacaccggatctatggtttccataattgagtaaatgaatgctcggcaataactaatggcaaatgtatagaacaacgaaattatactagagttgttaaagttaatattttctatgagctgttccaataaattatttgttgtaactgcgttcaagtcataaatcatcttgatactatccagtaaaccgtttttaagttctggaatattatcatcccattgtaaagcccctaattcgactatcgaatatcctgctctgatagcagtttcaatatcgacggacgtcaatactgtaataaaggtggtagtattgtcatcatcgtgataaactactggaatatggtcgttagtaggtacagtaactttacacaacgcgatatataactttccttttgtaccatttttaacgtagttgggacgtcctgcagggtattgttttgaagaaatgatatcgagaacagatttgatacgatatttgttggattcctgattattcactataatataatctagacagatagatgattcgataaatagagaaggtatatcgttggtaggataatacatccccattccagtattctcggatactctattgatgacactagttaagaacatgtcttctattctagaaaacgaaaacatcctacatggactcattaaaacttctaacgctcctgattgtgtctcgaatgcctcgtacaaggatttcaaggatgccatagattctttgaccaacgatttagaattgcgtttagcatctgatttttttattaaatcgaatggtcggctctctggtttgctaccccaatgataacaatagtcttgtaaagataaaccgcaagaaaatttatacgcatccatccaaataaccctagcaccatcggatgatattaatgtattattatagattttccatccacaattattgggccagtatactgttagcaacggtatatcgaatagattactcatgtaacctactagaatgatagttcgtgtactagtcataatatctttaatccaatctaaaaaatttaaaattagattttttacactgttaaagttaacaaaagtattacccgggtacgtggatatcatatatggcattggtccattatcagtaatagctccataaactgatacggcgatggtttttatatgtgtttgatctaacgaggaagaaattcgcgcccacaattcatctctagatatgtatttaatatcaaacggtaacacatcaatttcgggacgcgtatatgtttctaaatttttaatccaaatataatgatgacctatatgccctattatcatactgtcaactatagtacacctagggaacttacgatacatctgtttcctataatcgttaaattttacaaatctataacatgctaaaccttttgacgacagccattcattaatttctgatatggaatctgtattctcgataccgtatcgttctaaagccagtgctatatctccctgttcgtgggaacgctttcgtataatatcgatcaacggataatctgaagtttttggagaataatatgactcatgatctatttcgtccataaacaatctagacataggaattggaggcgatgatcttaattttgtgcaatgagtcgtcaatcctataacttctaatcttgtaatattcatcatcgacataatactatctatgttatcatcgtatattagtataccatgaccttcttcatttcgtgccaaaatgatatacagtcttaaatagttacgcaatatctcaatagtttcataattgttagctgttttcatcaaggtttgtatcctgtttaacatgatggcgttctataacgtctctattttctatttttaattttttaaatttttaacgatttactgtggctagatacccaatctctctcaaatatttttttagcctcgcttacaagctgtttatctatactattaaaactgacgaatccgtgattttggtaatgggttccgtcgaaatttgccgaagtgatatgaacatattcgtcgtcgactatcaacaattttgtattattctgaatagtgaaaaccttcacagatagatcattttgaacacacaacgcatctagacttttggcggttgccatagaatatacgtcgttcttatcccaattaccaactagaagtctgatcttaactcctctattaatggctgcttctataatggagttgtaaatgtcgggccaatagtagctattaccgtcgacacgtgtagtgggaactatggccaaatgttcaatatctatactagtcttagctgacctgagtttatcaataactacatcggtatctagatctctagaatatcccaataggtgttccggagaatcagtaaagaacactccacctataggattcttaatatgatacgcagtgctaactggcaaacaacaagccgcagagcataaattcaaccatgaattttttgcgctattaaaggctttaaaagtatcaaatcttctacgaagatctgtggccagcgggggataatcagaatatacacctaacgttttaatcgtatgtatagatcctccagtaaatgacgcgtttcctacataacatctttcatcatctgacacccaaaaacaaccgagtagtagtcccacattattttttttatctatattaacggttataaaatttatatccgggcagtgactttgtagctctcccagatttcttttccctcgttcatctagcaaaactattattttaatccctttttcagatgcctcttttagtttatcaaaaataagcgctcccctagtcgtactcagaggattacaacaaaaagatgctatgtatatatatttcttagctagagtgataatttcgttaaaacattcaaatgttgttaaatgatcggatctaaaatccatattttctggtagtgtttctaccagcctacattttgctcccgcaggtaccgatgcaaatggccacatttagttaacataaaaacttatacatcctgttctatcaacgattctagaatatcatcggctatatcgctaaaattttcatcaaagtcgacatcacaacctaactcagtcaatatattaagaagttccatgatgtcatcttcgtctatttctatatccgtatccattgtagattgttgaccgattatcgagtttaaatcattactaatactcaatccttcagaatacaatctgtgtttcattgtaaatttataggcggtgtatttaagttggtagattttcaattatgtattaatatagcaacagtagttcttgctcctccttgattctagcatcctcttcattattttcttctacgtacataaacatgtccaatacgttagacaacacaccgacgatggcggccgctacagacacgaatatgactaaaccgatgaccatttaaaaacccctctctagctttcacttaaactgtatcgatcattcttttagcacatgtataatataaaaacattattctatttcgaatttaggcttccaaaaatttttcatccgtaaaccgataataatatatatagacttgttaatagtcggaataaatagattaatgcttaaactatcatcatctccacgattagagatacaatatttacattctttttgctgtttcgaaactttatcaatacacgttaatacaaacccaggaaggagatattgaaactgaggctgttgaaaatgaaacggtgaatacaataattcagataatgtaaaatcatgattccgtattctgatgatattagaactgctaatggatgtcgatggtatgtatctaggagtatctattttaacaaagcatcgatttgctaatatacaattatccttttgattaattgttattttattcatattcttaaaaggtttcatatttatcaattcttctacattaaaaatttccatttttaatttatgtagccccgcaatactcctcattacgtttcattttttgtctataatatccattttgttcatctcggtacatagattatccaattgagaagcgcatttagtagttttgtacattttaagtttattgacgaatcgtcgaaaactagttatagttaacattttattatttgataccctgatattaatacccctgccgttactattatttataactgatgtaatccacgtaacattagaattaattatcgatagtaatgcatcgacgcttccaaaattgtctattataaactcaccgataatttttttattacatgttttcatattcattaggattatcaaatctttaatcttattacgattgtatgcgttgatattgcaagacgtcattctaaaagacggaggatctccatcaaatgccaaacaatcacgtacaaagtacatggaaataggttttgttctattgcgcatcatagatttatatagaacacccgtagaaatactaatttgttttactctataaaatactaatgcatctatttcatcgttttgtataacgtctttccaagtgtcaaattccaaatttttttcattgatagtaccaaattcttctatctctttaactacttgcatagataggtaattacagtgatgcctacatgccgttttttgaaactgaatagatgcgtctagaagcgatgctacgctagtcacaatcaccactttcatatttagaatatatgtatgtaaaaatatagtagaatttcattttgttttttctatgctataaatgaattctcattttgcatctgctcatactccgttttatatcaataccaaagaaggaagatatctggttctaaaagccgttaaagtatgcgatgttagaactgtagaatgcgaaggaagtaaagcttcctgcgtactcaaagtagataaaccctcatcgcccgcgtgtgagagaagaccttcgtccccgtccagatgcgagagaatgaataaccctggaaaacaagttccgtttatgagaacggacatgctacaaaatatgttcgcggctaatcgcgacaacgtggcgtcgagacttttgtcctaaaatacaattatatctttttcgatattaataaatccgtgtcgtccaggttttttatctctttcagtatgtgaatagataggtattttatctctattcatcatcgaatttaagagatccgataaacattgtttgtattctccagatgtcagcatctgatacaacaatatatgtgcacataaacctctggcacttatttcatgtaccttccccttatcactaaggagaatagtatttgagaaatatgtatacatgatattatcatgaattagatatacagaatttgtaacactctcgaaatcacacgatgtgtcggcgttaagatctaatatatcactcgataacacattttcatctagatacactagacattttttaaagctaaaatagtctttagtagtaacagtaactatgcgattattttcatcgatgatacatttcatcggcatattattacgcgtaccatcaaagactataccatgtgtatatctaacgtattctagcatggttgccatacgcgcattaaacttttcaggatctttggatagatcttccaatctatctatttgagaaaacatttttatcatgttcaatagttgaaacgtcggatccactatatagatattatctataaagattttaggaactacgttcatggtatcctggcgaatattaaaactatcaatgatatgattatcgttttcatcttttatcaccatatagtttctaagatatgggattttacttaatataatattatttcccgtgataaattttattagaaaggccaaatctataagaaaagtcctagaattagtctgaagaatatctatatcgccgtatagtatatttggattaattagatatagagaatatgatccgtaacatatacaacttttattatggcgtctaagatattcttccatcaacttattaacatttttgactagggaagatacattatgacgtcccattacttttgccttgtctattactgcgacgttcatagaatttagcatatctcttgccaattcttccattgatgttacattataagaaattttagatgaaattacatttggagctttaatagtaagaactcctaatatgtccgtgtatgtggtcactaatacagattgtagttctataatcgtaaataatttacctatattatatgtttgagtctgtttagaaaagtagctaagtatacgatcttttatttctgatgcagatgtattaacatcggaaaaaaatctttttttattcttttttactaaagatacaaatatgtctttgttaaaaacagttattttctgaatatttctagcttgtaattttaacatatgatattcgttcacactaggtactctgcctaaataggtttctataatctttaatgtaatattaggaaaagtattctgatcaggattcctattcattttgaggatttaaaactctgattattgtctaatatggtctctacgcaaactttttcacagagcgatagagtttttgataactcgtttttcttaagaaatataaaactactgtttccagagctcgctctatcttttattttatctaattcgatacaaactcctgatactggttcagaaagtaattcattaattttcagtcctttatagaagatatttaatatagataatacaaaattttcagttcttgatatcgatctgattgatcctagaactagatatattaataacgtgctcattaggcagtttatggcagcttgataattagatatagtatattccagttcatatttattagataccgcattgcccagattttgatattctatgaattcctctgaaaataaatccaaaataactagacattctattttttgtggattagtgtactctcttccctctatcatgttcactactggtgtccacgatgataaatatctagagggaatataatatagtccataggatgccaatctagcaatgtcgaataactgtaatttgattcttcgttcttcattatgaattgattcttgaggtataaacctaacacaaattatattattagacttttcgtatgtaatgtctttcatgttataagtttttaatcctggaatagaatctattttaatgaggcttttaaacgcagagttctccaacgagtcaaagcataatactctgttgtttttcttatatacgatgttacgattttcttctttgaatggaataggtttttgaattagtttataattacaacataatagataaggaagtgtgcaaatagtacgcggaaaaaacataatagctcccctgttttcatccatggttttaagtaaatgatcactggcttctttagtcaatggatattcgaacattaaccgtttcatcatcattggacagaatccatatttcttaatgtaaagagtgatcaaatcattgtgtttattgtaccatcttgttgtaaatgtgtattcggttatcggatctgctcctttttctattaaagtatcgatgtcaatctcgtctaagaattcaactatatcgacatatttcatttgtatacacataaccattactaacgtagaatgtataggaagagatgtaacgggaacagggtttgttgattcgcaaactattctaatacataattcttctgttaatacgtcttgcacgtaatctattatagatgccaagatatctatataattattttgtaagatgatgttaactatgtgatctatataagtagtgtaataattcatgtattttgatatatgttccaactctgtctttgtgatgtctagtttcgtaatatctatagcatcctcaaaaaatatattcgcatatattcccaagtcttcagttctatcttctaaaaaatcttcaacgtatggaatataataatctattttacctcttctgatatcattaatgatatagtttttgacactatcttctgtcaattgattcttattcactatatctaagaaacggatagcgtccctaggacgaactactgccattaatatctctattatagcttctggacataattcatctattataccagaattaatgggaactattccgtatctatctaacatagttttaagaaagtcagaatctaagacttgatgttcatatattggttcatacatgaaatgatctctattgatgatagtgactatttcattctctgaaaattggtaactcattctatatatgctttccttgttgatgaaggatagaatatactcaatagaatttgtaccaacaaactgttctcttatgaatcgtatatcatcatctgaaataatcatgtaaggcatacatttaacaattagagacttgtctcctgttatcaatatactattcttgtgataatttatgtgtgaggcaaatttgtccacgttctttaattttgttatagtagatatcaaatccaatggagctacagttcttggcttaaacagatatagtttttctggaacaaattctacaacattattataaaggactttgggtaaataagtgggatgaaatcctattttaattaatgcgatagccttgtcctcgtgcagatatccaaacgcttttgtgatagtatggcattcattgtctagaaacgctctacgaatatctgtgacagatatcatctttagagaatatactagtcgcgttaatagtactacaatttgtattttttaatctatctcaataaaaaaattaatatgtatgattcaatgtataactaaactactaactgttattgataactagaatcagaatctaatgatgacgtacccaagaagtttatctactgccaatttagctgcattatttttagcatctcgtttagattttccatctgccttatcgaatactcttccgtcgatatctacacaggcataaaatgtaggagagttactaggcccaactgattcaatacgaaaagaccaatctctcttagttatttggcagtactcattaataacggtgacagggttagcatctttccaatcaataatttttttagccggaataacatcatcaaaagacttatgatcctctctcattgatttttcgcgggatacatcatctattatgacgtcagccataacatcagcatccggcttatccgcctccgttgtcataaaccaacgaggaggaatatcgtcggagctgtacaccatagcactacgttgaagatcgtacagagctttattaacttctcgcttctccatattaagttgtctagttagttgtgcagcagtagctccttcgattccaatggttttaatagcctcacacacaatctctgcgttagaacgttcgtcgatatagattttagacatttttagagagaactaacacaaccagcaataaaactgaacctactttatcatttttttattcatcatcctctggtggttcgtcgttcctatcaaatgtagctctgattaacccgtcatctataggtgatgctggttctggagattctggaggagatggattattatctggaagaatctctgttatttccttgttttcatgtatcgattgcgttgtaacattaagattgcgaaatgctctaaatttgggaggcttaaagtgttgtttgcaatctctacacgcgtgtctaactagtggaggttcgtcagctgctctagtttgaatcatcatcggcgtagtattcctacttttacagttaggacacggtgtattgtatttctcgtcgagaacgttaaaataatcgttgtaactcacatcctttattttatctatattgtattctactcctttcttaatgcattttataccgaataagagatagcgaaggaattctttttcggtgccgctagtacccttaatcatatcacatagtgttttatattccaaatttgtggcaatagacggtttatttctatacgatagtttgtttctggaatcctttgagtattctataccaatattattctttgattcgaatttagtttcttcgatattagattttgtattacctatattcttgatgtagtactttgatgatttttccatggcccattctattaagtcttccaagttggcatcatccacatattgtgatagtaattctcggatatcagtagcggctaccgccattgatgtttgttcattggatgagtaactactaatgtatacattttccatttataacacttatgtattaactttgttcatttatattttttcattattatgttgatattaacaaaagtgaatatatatatatgttaataattgtattgtggttatacggctacaattttataatgagtgaaagtcagtgtccgatgatcaatgacgatagctttactctgaaaagaaagtatcaaatcgatagtgcggagtcaacaataaaaatggataagaagaggataaagtttcagaatagagccaaaatggtaaaagaaataaatcagacaataagagcagcacaaactcattacgagacattgaaactaggatacataaaatttaagagaatgattaggactactactctagaagatatagcaccatctattccaaataatcagaaaacttataaactattctcggacatttcagccatcggcaaagcatcacagaatccgagtaagatggtatatgctctgctgctttacatgtttcccaatttgtttggagatgatcatagattcattcgttatagaatgcatccaatgagtaaaatcaaacacaagatcttctctcctttcaaacttaatcttattagaatattagtggaagaaagattctataataatgaatgcagatctaataaatggaaaataattggaacacaagttgataaaatgttgatagctgaatctgataaatatacaatagatgcaaggtataacctaaaacccatgtatagaatcaagggagaatctgaagaagataccctcttcatcaaacagatggtagaacaatgtgtgacatcccaggaattggtggaaaaagtgttgaagatactgtttagagatttgttcaagagtggagaatacaaagcgtacagatacgatgatgatgtagaaaatggattcattggattggatacactaaaattaaacattgttcatgatatagttgaaccatgtatgcctgttcgtaggccagtggctaagatactgtgtaaagaaatggtaaataaatactttgagaatccgctacatattattggtaagaatcttcaagagtgcattgactttgttagtgaataggcatttcatctttctccaatactaattcaaattgttaaattaataatggatagtataaatagtaaaaataattattagaataagagtgtagtatcatagataactctcttctataaaaatggattttattcgtagaaagtatcttatatacacagtagaaaataatatagattttttaaaggatgatacattaagtaaagtaaacaattttaccctcaatcatgtactagctctcaagtatctagttagcaattttcctcaacacgttattactaaggatgtattagctaataccaatttttttgttttcatacatatggtacgatgttgtaaagtgtacgaagcggttttacgacacgcatttgatgcacccacgttgtacgttaaagcattgactaagaattatttatcgtttagtaacgcaatacaatcgtacaaggaaaccgtgcataaactaacacaagatgaaaaatttttagaggttgccgaatacatggacgaattaggagaacttataggcgtaaattatgacttagttcttaatccattatttcacggaggggaacccatcaaagatatggaaatcatttttttaaaactgtttaagaaaacagacttcaaagttgttaaaaaattaagtgttataagattacttatttgggcatacctaagcaagaaagatacaggcatagagtttgcggataatgatagacaagatatatacactctatttcaacaaactggtagaatcgtccatagcaatctaacagaaacgtttagagattatatctttcccggagataagactagctattgggtgtggttaaacgaaagtatagctaatgatgcggatatcgttcttaatagacccgccattaccatgtatgataaaattcttagttatatatactctgagataaaacaaggacgcgttaataaaaacatgcttaagttagtttatatctttgagcctgaaaaagatatcagagaacttctgctagaaatcatatatgatattcctggagatatcctatctattattgatgcaaaaaacgacgattggaaaaaatattttattagtttttataaagctaattttattaacggtaatacatttattagtgatagaacgtttaacgaggacttattcagagttgttgttcaaatagatcccgaatatttcgataatgaacgaattatgtctttattctctacgagtgctgcggacattaaacgatttgatgagttagatattaataacagttatatatctaatataatttatgaggtgaacgatatcacattagatacaatggatgatatgaagaagtgtcaaatctttaacgaggatacgtcgtattatgttaaggaatacaatacatacctgtttttgcacgagtcggatcccatggtcatagagaacggaatactaaagaaactgtcatctataaaatccaagagtagacggctgaacttgtttagcaaaaacattttaaaatattatttagacggacaattggctcgtctaggtcttgtgttagatgattataaaggagacttgttagttaaaatgataaaccatcttaagtctgtggaggatgtatccgcattcgttcgattttctacagataaaaaccctagtattcttccatcgctaatcaaaactattttagctagttataatatttccatcatcgtcttatttcaaaggtttttgagagataatctatatcatgtagaagaattcttggataaaagcatccatctaaccaagacggataagaaatatatacttcaattgataagacacggtagatcatagaacagaccaaatatattattaataatttgtatatacatagatataattatcacatatttttgataaatgggaactgctgcaacaattcagactcccaccaaattaatgaataaagaaaatgcagaaatgattttggaaaaaattgttgatcatatagttatgtatattagtgacgaatcaagtgattcagaaaataatcctgaatatattgattttcgtaacagatacgaagactatagatctctcattataaaaagtgatcacgagtttgtaaagctatgtaaaaatcatgcggagaaaagttctccagaaacgcaacaaatgattatcaaacacatatacgaacaatatcttattccagtatctgaagtactattaaaacctataatgtccatgggtgacataattacatataacggatgtaaagacaatgaatggatgctagaacaactctctaccctaaactttaacaatctccgcacatggaactcatgtagcataggcaatgtaacgcgtctgttttatacattttttagttatctgatgaaagataaactaaatatataagtataatcccattctaatactttaacctgatgtattagcatcttattagaatattaacctaactaaaagacataacataaaaactcattacatagttgataaaaagcggtaggatataaatattatggctgccaccgttccgcgttttgacgacgtgtacaaaaatgcacaaagaagaattctagatcaagaaacattttttagtagaggtctaagtagaccgttaatgaaaaacacatatctatttgataattacgcgtatggatggataccagaaactgcaatttggagtagtagatacgcaaacttagatgcaagtgactattatcccatttcgttgggattacttaaaaagttcgagtttctcatgtctctatataaaggtcctattccagtatacgaagaaaaagtaaatactgaattcattgctaatggatctttctccggtagatacgtatcatatcttagaaagttttctgctcttccaacaaacgagtttattagttttttgttactgacttccattccaatctataatatcttgttctggtttaaaaatactcagtttgatattactaaacacacattattcagatacgtctatacagataatgccaaacacctggcgttggctaggtatatgtatcaaacaggagactataagcctttgtttagtcgtctcaaagagaattatatatttaccggtcccgttccaatatgtatcaaagatatagatcaccctaatcttagtagagcaagaagtccatccgattatgagacattagctaatattagtactatattgtactttaccaagtatgatccggtattaatgtttttattgttttacgtacctgggtattcaattactacaaaaattactccagccgtagaatatctaatggataaactgaatctaacaaagagcgacgtacaactgttgtaaattattttatgcttcgtaaaatgtaggttttgaaccaaacattctttcaaagaatgagatgcataaaactttattatccaatagattgactatttcggacgtcaatcgtttaaagtaaacttcgtaaaatattctttgatcactgccgagtttaaaacttctatcgataattgtttcatatgttttaatatttacaagttttttggtccatggtccattaggacaaatatatgcaaaataatatcgttctccaagttctatagtctctggattatttttattatattcagtaaccaaatacatattagggttatctgcggatttataatttgagtgatgcattcgactcaacataaataattctagaggagacgatctactatcaaattcggatcgtaaatctgtttctaaagaacggagaatatctatacatacctgattagaattcatccgtccttcagacaacatctcagacagtctggtcttgtatgtcttaatcatattcttatgaaacttggaaacatctcttctagtttcactagtacctttattaattctctcaggtacagattttgaattcgacgatgccgagtatttcatcgttgtatatttcttcttcgattgcataatcagattcttatataccgcctcaaactctattttaaaattattaaacaatactctattattaatcagtcgttctaactctttcgctatttctatagacttatctacatcttgactgtctatctctgtaaacacggagtcggtatctccatacacgctacgaaaacgaaatctgtaatctataggcaacgatgttttcacaatcggattaatatctctatcgtccatataaaatggattacttaatggattggcaaaccgtaacataccgttagataactctgctccatttagtaccgattctagatacaagatcattctacgtcctatggatgtgcaactcttagccgaagcgtatgagtatagagcactatttctaaatcccatcagaccatatactgagttggctactatcttgtacgtatattgcatggaatcatagatggccttttcagttgaactggtagcctgttttagcatctttttatatctggctctctctgccaaaaatgttcttaatagtctaggaatggttccttctatcgatctatcgaaaattgctatttcagagatgaggttcggtagtctaggttcacaatgaaccgtaatatatctaggaggtggatatttctgaagcaatagctgattatttatttcttcttccaatctattggtactaacaacgacaccgactaatgtttccggagatagatttccaaagatacacacattaggatacagactgttataatcaaagattaatacattattactaaacattttttgttttggagcaaataccttaccgccttcataaggaaacttttgttttgtttctgatctaactaagatagttttagtttccaacaatagctttaacagtggacccttgatgactgtactcgctctatattcgaataccatggattgaggaagcacatatgttgacgcacccgcgtctgtttttgtttctactccataatactcccacaaatactgacacaaacaagcatcatgaatacagtatctagccatatctaaagctatgtttagattataatccttatacatctgagctaaatcaacgtcatcctttccgaaagataatttatatgtatcattaggtaaagtaggacataatagtacgactttaaatccattttcccaaatatctttacgaattactttacatataatatcctcatcaacagtcacataattacctgtggttaaaacctttgcaaatgcagcggctttgcctttcgcgtctgtagtatcgtcaccgatgaacgtcatttctctaactcctctatttaatactttacccatgcaactgaacgcgttcttggatatagaatccaatttgtacgaatccaatttttcaaatttttgaatgaatgaatatagatcgaaaaatatagttccattattgttattaacgtgaaacgtagtattggccatgccgcctactcccttatgactagactgatttctctcataaatacagagatgtacagcttcctttttgtccggagatctaaagataatcttctctcctgttaataactctagacgattagtaatatatctcagatcaaagttatgtccgttaaaggtaacgacgtagtcgaacgttagttccaacaattgtttagctattcgtaacaaaactatttcagaacataaaactagttctcgttcgtaatccatttccattagtgactgtatcctcaaacatcctctatcgacggcttcttgtatttcctgttccgttaacatctcttcattaatgagcgtaaacaataatcgtttaccacttaaatcgatataacagtaacttgtatgcgagattgggttaataaatacagaaggaaacttcttatcgaagtgacactctatatctagaaataagtacgatcttgggatatcgaatctaggtatttttttagcgaaacagttacgtggatcgtcacaatgataacatccattgttaatctttgtcaaatattgctcgtccaacgagtaacatccgtctggagatatcccgttagaaatataaaaccaactaatattgagaaattcatccatggtggcattttgtatgctgcgtttctttggctcttctatcaaccacatatctgcgacggagcattttctatctttaatatctagattataacttattgtctcgtcaatgtctatagttctcatctttcccaacggcctcgcattaaatggaggaggagacaatgactgatatatttcgtccgtcactacgtaataaaagtaatgaggaaatcgtataaatacggtctcaccatttcgacatctggatttcagatataaaaatctgttttcaccgtgactttcaaaccaattaatgcaccgaacatccatttatagaatttagaaatatattttcatttaaatgaatcccaaacattggggaagagccgtatggaccattatttttatagtactttcgcaagcgggtttagacggcaacatagaagcgtgtaaacgaaaactatatactatagttagcactcttccatgtcctgcatgtagacggcacgcgactatcgctatagaggacaataatgtcatgtctagcgatgatctgaattatatttattattttttcatcagattatttaacaatttggcatctgatcccaaatacgcgatcgatgtgacaaaggttaaccctttataaacttaacccattataaaacttatgattagtcacgactgaaataaccgcgtgattattttttggtataattctacacggcatggtttctgtgactatgaattcaacccccgttacattagtgaaatctttaacaaacagcaagggttcgtcaaagacataaaactcattgtttacgatcgaaatagaccccctatcacacttaaaataaaaaatatccttatcctttaccaccaaataaaattctgattggtcaatgtgaatgtattcacttaacagttccacaaatttatttattaactccgaggcacatacatcgtcggtattttttatggcaaactttactcttccagcatccgtttctaaaaaaatattaacgagttccatttatatcatccaatattattgaaatgacgttgatggacagatgatacaaataagaaggtacggtacctttgtccaccatctcctccaattcatgctctattttgtcattaactttaatgtatgaaaacagtacgccacatgcttccatgacagtgtgtaacactttggatacaaaatgtttgacattagtataattgtccaagactgtcaatctataatagatagtagctataatatattctatgatggtattgaagaagatgacaaccttggcatattgatcatttaacacagacatggtatcaacagatagcttgaatgaaagagaatcagtaattggaataagcgtcttctcgatagagtgtccgtataccaacatgtctgatattttgatgtattccattaaattatttagttttttctttttattttcgttaaacagcatttctgtcaacggaccccaacatcgttgaccgattaagttttgattgatttttccgtgtaatgcgtatctagtcagatcgtatagcctatccaataatccatcgtctgtgtgtagatcacatcgtacactttttaattctctatagaagagcgacagacatctggagcaattacagacagcaatttctttattctctacagatgtaagatacttgaagacattcctatgatgatgcagaattttggataacacggtattgatggtatctgttaccataattcctttgatggctgatagtgtcagagcacaagatttccaatctttgacaatttttagcaccattatctttgttttgatatctatatcagacagcatggtgcgtctgacaacacagggattaagacggaaagatgaaatgattctctcaacatcttcaatagataccttgctattttttctggcattatctatatgtgcgagaatatcctctagagaatcagtatcctttttgatgatagtggatctcaatgacatgggacgtctaaaccttcttattctatcaccagattgcatggtgatttgtcttctttcttttatcataatgtaatctctaaattcatcggcaaattgtctatatctaaaatcataatatgagatgtttacctctacaaatatctgttcgtccaatgttagagtatttacatcagttttgtattccaaattaaacatggcaacggatttaattttatattcctctattaagtcctcgtcgataataacagaatgtagataatcatttaatccatcgtacatggttggaagatgcttgttgacaaaatctttaattgtcttgatgaaggtgggactatatctaacatcttgattaataaaatttataacattgtccataggatactttgtaactagttttatacacatctcttcatcggtaagtttagacagaatatcgtgaacaggtggtatattatattcatcagatatacgaagaacaatgtccaaatctatattgtttaatatattatatagatgtagcgtagctcctacaggaatatctttaactaagtcaatgatttcatcaaccgttagatctattttaaagttaatcatataggcattgatttttaaaaggtatgtagccttgactacattctcattaattaaccattccaagtcactgtgtgtaagaagattatattctatcataagcttgactacatttggtcccgataccattaaagaattcttatgatataaggaaacagcttttaggtactcatctactctacaagaattttggagagccttaacgatatcagtgacgtttattatttcaggaggaaaaaacctaacattgagaatatcggaattaatagcttccagatacagtgattttggcaatagtccgtgtaatccataatccagtaacacgagctggtgcttgctagacaccttttcaatgtttaatttttttgaaataagctttgataaagccttcctcgcaaattccggatacatgaacatgtcggcgacatgattaagtattgttttttcattattttctcaataccccaatagatgatagaatatcacccaatgcgtccatgttgtctatttccaacaggtcgctatatccaccaatagaagtttttccaaaaaagattctaggaacagttctaccaccagtaatttgttcaaaatagtcacgcaattcattttcgggtttaaattctttaatatcgacaatttcatacgctcctcttttgaaactaaacttatttagaatatccagtgcatttctacaaaaaggacatgtatacttgacaaaaattgtcactttgttattggccaacctttgttgtacaaattcctcggccattttaatatttaagtgatataaaactatctcgacttatttaactctttagtcgagatatatggacgcagatagctatatgatagccaactacagaaggcaaacgctataaaaaacataattacgacgagcatatttataaatatttttattcagcattacttgatatagtaatattaggcacagtcaaacattcaaccactctcgatacattaactctctcattttctttaacaaattctgcaatatcttcgtaaaaagattcttgaaactttttagaatatctatcgactctagatgaaatagcgttcgtcaacatactatgttttgtatacataaaggcgcccattttaacagtttctagtgacaaaatgctagcgatcctaggatcctttagaatcacatagattgacgattcgtctctcttagtaactctagtaaaataatcatacaatctagtacgcgaaataatattatccttgacttgaggagatctaaacaatctagttttgagaacatcgataagttcatcgggaatgacatacatactatctttaatagaactcttttcatccagttgaatggattcgtccttaaccaactgattaatgagatcttctattttatcattttccagatgatatgtatgtccattaaagttaaattgtgtagcgcttctttttagtctagcagccaatactttaacatcactaatatcgatatacaaaggagatgatttatctatggtattaagaattcgtttttcgacatctgtcaaaaccaattcctttttgcctgtatcatccagttttccatcctttgtaaagaaattattttctactagactattaataagactgataaggattcctccataattgcacaatccaaactttttcacaaaactagactttacaagatctacaggaatgcgtacttcaggttttttagcttgtgattttttcttttgcggacattttcttgtgaccaactcatctaccatttcattgattttagcagtgaaataagctttcaatgcacgggcactgatactattgaaaacgagttgatcttcaaattccgccatttaagttcaccaaacaacttttaaatacaaatatatcaatagtagtagaataagaactataaaaaaaataataattaaccaataccaaccccaacaaccggtattattagttgatgtgactgttttctcatcacttagaacagatttaacaatttctataaagtctgtcaaatcatcttccggagaccccataaatacaccaaatatagcggcgtacaacttatccatttatacattgaatattggcttttctttatcgctatcttcatcatattcatcatcaatatcaacaagtcccagattacgagccagatcttcttctacattttcagtcattgatacacgttcactatctccagagagtccgataacgttagccaccacttctctatcaatgattagtttcttgagcgcgaaagtaatttttgtttccgttccggatctatagaagacgataggtgtgataattgccttggccaattgtctttctcttttactgagtgattctagttcaccttctatagatctgagaatggatgattctccagtcgaaacatattctaccatggatccgtttaatttgttgatgaagatggattcatccttaaatgttttctctgtaatagtttccaccgaaagactatgcaaagaatttggaatgcgttccttgtgcttaatgtttccatagacggcttctagaagttgatacaacataggactagccgcggtaacttttatttttagaaagtatccatcgcttctatcttgtttagatttatttttataaagtttagtctctccttccaacataataaaagtggaagtcatttgactagataaactatcagtaagttttatagagatagacgaacaattagcgtattgagaagcatttagtgtaacgtattcgatacattttgcattagatttactaatcgattttgcatactctataacacccgcacaagtctgtagagaatcgctagatgcagtaggtcttggtgaagtttcaactctcttcttgattaccttactcatgattaaacctaaataattgtactttgtaatataatgatatatattttcactttatctcatttgagaataaaaatgtttttgtttaaccactgcatgatgtacagatttcggaatcgcaaaccaccagtggttttattttatccttgtccaatgtgaattgaatgggagcggatgcgggtttcgtacgtagatagtacattcccgtttttagaccgagactccatccgtaaaaatgcatactcgttagtttggaataactcggatctgctatatggatattcatagattgactttgatcgatgaaggctcccctgtctgcagccatttttatgatcgtcttttgtggaatttcccaaatagttttataaactcgcttaatatcttctggaaggtttgtattctgaatggatccaccatctgccataatcctattcttgatctcatcattccataattttctctcggttaaaactctaaggagatgcggattaactacttgaaattctccagacaatactctccgagtgtaaatattactggtatacggttccaccgactcattatttcccaaaatttgagcagttgatgcagtcggcataggtgccaccaataaactatttctaagaccgtatgttctgattttatcttttagaggttcccaattccaaagatccgacggtacaacattccaaagatcatattgtagaataccgttactggcgtacgatcctacatatgtatcgtatggtccttccttctcagctagttcacaactcgcctctaatgcaccgtaataaatggtttcgaagatcttcttatttagatcttgtgcttccaggctatcaaatggataatttaagagaataaacgcgtccgctaatccttgaacaccaataccgataggtctatgtctcttattagagatttcagcttctggaataggataataattaatatctataattttattgagatttctgacaattactttgaccacatccttcagtttgagaaaatcaaatcgcccatctattacaaacatgttcaaggcaacagatgccagattacaaacggctacctcattagcatccgcatattgtattatctcagtgcaaagattactacacttgatagttcctaaattttgttgattactctttttgttacacgcatccttataaagaatgaatggagtaccagtttcaatctgagattctataatcgctttccagacgactcgagcctttattatagatttgtatctcctttctctttcgtatagtgtatacaatcgttcgaactcgtctccccaaacattgtccaatccaggacattcatccggacacatcaacgaccactctccgtcatccttcactcgtttcataaagagatcaggaatccaaagagctataaatagatctctggttctatgttcctcgtttcctgtattctttttaagatcgaggaacgccataatatcagaatgccacggttccaagtatatggccataactccaggccgtttgtttcctccctgatctatgtatctagcggtgttattataaactctcaacattggaataataccgtttgatataccattggtaccggagatatagcttccactggcacgaatattactaattgatagacctattccccctgccattttagagattaatgcgcatcgttttaacgtgtcatagataccctctatgctatcatcgatcatgttaagtagaaaacagctagacatttggtgacgactagttcccgcattaaataaggtaggagaagcgtgcgtaaaccatttttcagaaagtagattgtacgtctcaatagctgagtctatatcccattgatgaattcctactgcgacacgcattaacatgtgctgaggtctttcaacgatcttgttgtttattttcaacaagtaggatttttccaaagttttaaaaccaaaatagttgtatgaaaagtctcgttcgtaaataataaccgagttgagtttatccttatatttgttaactatatccatggtgatacttgaaataatcggagaatgtttcccatttttaggattaacatagttgaataaatcctccatcacttcactaaatagtttttttgtttccttgtgtagatttgatacggctattctggcggctagaatggcataatccggatgttgtgtagtacaagtggctgctatttcggctgccagagtgtccaattctaccgttgttactccattatatattccttgaataaccttcatagctattttaataggatctatatgatccgtgtttaagccataacataattttctaatacgagacgtgattttatcaaacatgacattttccttgtatccatttcgtttaatgacaaacatttttgttggtgtaataaaaaaattatttaacttttcattaatagggatttgacgtatgtagcgtacaaaatgatcgttcctggtatatagataaagagtcctatatatttgaaaatcgttacggctcgattaaactttaatgattgcatagtgaatatatcattaggatttaactccttgactatcatggcggcgccagaaattaccatcaaaagcattaatacagttatgccgatcgcagttaaaacggttatagcatccaccatttatatctaaaaattagatcaaagaatatgtgacaaagtcctagttgtatactgagaattgacgaaacaatgtttcttacatatttttttcttattagtaactgacttaatagtaggaactggaaagctagacttgattattctataagtatagatacccttccagataatgttctctttgataaaagttccagaaaatgtagaattttttaaaaagttatcttttgctattaccaagattgtgtttagacgcttattattaatatgagtgatgaaatccacaccgcctctagatatcgcctttatttccacattagatggtaaatccaatagtgaaactatctttttaggaatgtatggactcgcgtttagaggagtgaacgtcttgggcgtcggaaaggatgattcgtcaaacgaataaacaatttcacaaatggatgttaatgtattagtaggaaatttcttgacgctattggaattgaagattctaatggatgatgttctacctatttcatccgataacatgttaatttccgacaccaacggttttaatatttcgatgatatacggtagtctctctttcggacttatatagcttattccacaatacgagtcattatatactccaaaaaacaaaataactagtataaaatctgtatcgaatgggaaaaacgaaattatcgacataggtatagaatccggaacattgaacgtattaatacttaattctttttctgtggtaagtaccgataggttattgacattgtatggttttaaatattctataacttgagacttgatagatattagtgatgaattgaaaattatttttatcaccacgtgtgtttcaggatcatcgtcgacgcctgtcaaccaaccgaatggagtaaaataaatatcattaatatatgctctagatattagtatttttattaatcctttgattatcatcttctcgtaggcgaatgattccatgatcaagagtgatttgagaacatcctccggagtattaatgggcttagtaaacagtccatcgttgcaataataaaagttatccaagttaaaggatattatgcattcgtttaaagatatcacctcatctgacggagacaattttttggtaggttttagagactttgaagctacttgtttaacaaagttattcatcgtcgtctactattctatttaattttgtagttaatttatcacatatcacattaattgactttttggtccatttttccatacgtttatattcttttaatcctgcgttatccgtttccgttatatccagggatagatcttgcaagttaaatagaatgctcttaaataatgtcattttcttatccgctaaaaatttaaagaatgtataaacctttttcagagatttgaaactcttaggtggtgtcctagtacacaatatcataaacaaactaataaacattccacattcagattccaacagctgattaacttccacattaatacagcctattttcgctccaaatgtacattcgaaaaatctgaataaaacatcgatgtcacaatttgtattatccaatacagaatgtttgtgattcgtgttaaaaccatcggagaaggaatagaaataaaaattattatagtggtggaattcagttggaatattgcctccggagtcataaaaggatactaaacattgttttttatcataaattacacatttccaatgagacaaataacaaaatccaaacattacaaatctagaggtagaacttttaattttgtctttaagtatatacgataagatatgtttattcataaacgcgtcaaatttttcatgaatcgctaaggagtttaagaatctcatgtcaaattgtcctatataatccacttcggatccataagcaaactgagagactaagttcttaatacttcgattgctcatccaggctcctctctcaggctctattttcatcttgacgacctttggattttcaccagtatgtattcctttacgtgataaatcatcgattttcaaatccatttgtgagaagtctatcgccttagatactttttcccgtagtcgaggtttaaaaaaatacgctaacggtatactagtaggtaactcaaagacatcatatatagaatggtaacgcgtctttaactcgtcggttaactctttcttttgatcgagttcgtcgctactattgggtctgctcaggtgccccgactctactagttccaacatcataccgataggaatacaagacactttgccggcggttgtagatttatcatatttttccactacatatccgttacaatttgttaaaaatttagatacatctatattgctacataatccagctagtgaatatatatgacataataaattggtaaatcctagttctggtattttactaattactaaatctgtatatctttccatttatcatggaaaagaatttaccagatatcttcttttttccaaactgcgttaatgtattctcttacaaatattcacaagatgaattcagtaatatgagtaaaacggaacgtgatagtttctcattggccgtgtttccagttataaaacatagatggcataacgcacacgttgtaaaacataaaggaatatacaaagttagtacagaagcacgtggaaaaaaagtatctcctccatcactaggaaaacccgcacacataaacctaaccgcgaagcaatatatatacagtgaacacacaataagctttgaatgttatagttttctaaaatgtataacaaatacagaaatcaattcgttcgatgagtatatattaagaggactattagaagctggtaatagtttacagatattttccaattccgtaggtaaacgaacagatactataggtgtactagggaataagtatccatttagcaaaattccattggcctcattaactcctaaagcacaacgagagatattttcagcgtggatttctcatagacctgtagttttaactggaggaactggagtgggtaagacgtcacaggtacccaagttattgctttggtttaattatttatttggtggattctctactctagataaaatcactgactttcacgaaagaccagtcattctatctcttcctaggatagctttagttagattgcatagcaataccattttaaaatcattgggatttaaggtactagatggatctcctatttctttacggtacggatctataccggaagaattaataaacaaacaaccaaaaaaatatggaattgtattttctacccataagttatctctaacaaaactatttagttatggcactcttattatagacgaagttcatgagcatgatcaaataggagatattattatagcagtagcgagaaagcatcatacgaaaatagattctatgtttttaatgactgccacgttagaggatgacagggaacggctaaaagtatttttacctaatcccgcatttatacatattcctggagatacactgtttaaaattagcgaggtatttattcataataagataaatccatcttccagaatggcatacatagaagaagaaaagagaaatttagttactgctatacagatgtatactcctcctgatggatcatccggtatagtctttgtggcatccgttgcacagtgtcacgaatataaatcatatttagaaaaaagattaccgtatgatatgtatattattcatggtaaggtcttagatatagacgaaatattagaaaaagtgtattcatcacctaatgtatcgataattatttctactccttatttggaatccagcgttactatacgcaatgttacacacatttatgatatgggtagagtttttgtccccgctccttttggaggatcgcaacaatttatttctaaatctatgagagatcaacgaaaaggaagagtaggaagagttaatcctggtacatacgtctatttctatgatctgtcttatatgaagtctatacagcgaatagattcagaatttctacataattatatattgtacgctaataagtttaatctaacactccccgaagatttgtttataatccctacaaatttggatattctatggcgtacaaaggaatatatagactcgttcgatattagtacagaaacatggaataaattattatccaattattatatgaagatgatagagtatgctaaactttatgtactaagtcctattctcgctgaggagttggataactttgagaggacgggagaattaactagtattgtacgagaagccattttatctctaaatttacaaattaagattttaaattttaaacataaagatgatgatacgtatatacacttttgtaaaatattattcggtgtctataacggaacaaacgctactatatattatcatagacctctaacgggatatatgaatatgatttcagatactatatttgttcctgtagataataactaaaaatcaaactctaatgaccacatctttttttagagatgaaaaattttccacatctccttttgtagacacgactaaacattttgcagaaaaaagtttattagtgtttagataatcgtatacttcatcagtgtagatagtaaatgtgaacagataaaaggtattcttgctcaatagattggtaaattccatagaatatattaatcctttcttcttgagatcccacatcatttcaaccagagacgttttatccaatgatttacctcgtactataccacatacaaaactagattttgcagtgacgtcgtacctggtattcctaccaaacaaaattttacttttagttcttttagaaaattctaaggtagaatctctatttgccaatatgtcatctatggaattaccactagcaaaaaatgatagaaatatatattgatacatcgcagctggttttgatctactatactttaaaaacgaatcagattccataattgcctgtatatcatcagctgaaaaactatgttttacacgtattccttcggcatttctttttaatgatatatcttgtttagacaatgataaagttatcatgtccatgagagacgcgtctccgtatcgtataaatatttcattagatgttagacgcttcattaggggtatacttctataaggtttcttaatcagtccatcattggttgcgtcaagaactactatcggatgttgttgggtatctctagtgttacacatggccttactaaagtttgggtaaataactatgatatctctattaattatagatgcatatatttcattcgtcaaggatattagtatcgacttgctatcgtcattaatacgtgtaatgtaatcatataaatcatgcgatagccaaggaaaatttaaatagatgttcatcatataatcgtcgctataattcatattaatacgttgacattgactaatttgtaatatagcctcgccacgaagaaagctctcgtattcagtttcatcgataaaggataccgttaaatataactggttgccgatagtctcatagtctattaagtggtaagtttcgtacaaatacagaatccctaaaatattatctaatgttggattaatctttaccataactgtataaaatggagacggagtcataactattttaccgtttgtacttactggaatagatgaaggaataatctccggacatgctggtaaagacccaaatgtctgtttgaagaaatccaatgttccaggtcctaatctcttaacaaaaattacgatattcgatcccgatatcctttgcattctatttaccagcatatcacgaactatattaagattatctatcatgtctattctcccaccgttatataaatcgcctccgctaagaaacgttagtatatccatacaatggaatacttcatttctaaaatagtattcgttttctaattctttaatgtgaaatcgtatactagaaagggaaaaattatctttgagttttccgttagaaaagaaccacgaaactaatgttctgattgcgtccgattccgttgctgaattaatggatttacaccaaaaactcatataacttctagatgtagaagcattcgctaaaaaattagtagaatcaaaggatataagtagatgttccaacaagtgagcaattcccaagatttcatctatatcattctcgaatccgaaattagaaattcccaagtagatatcctttttcatccgatcgttgatgaaaatacgaactttattcggtaagacaatcatttactaaggagtaaaataggaagtaatgttcgtatgtcgttatcatcgtataaattaaaggtgtgttttttaccattaagtgacattataattttaccaatattggaattataatataggtgtatttgcgcactcgcgacggttgatgcatcggtaaatatagctgtatctaatgttctagtcggtatttcatcatttcgctgtctaataatagcgttttctctatctgtttccattacagctgcctgaagtttattggtcggataatatgtaaaataataagaaatacatacgaataacaaaaataaaataagatataataaagatgccatttagagatctaattttgtttaacttgtccaaattcctacttacagaagatgaggaatcgttggagatagtgtcttccttatgtagaggatttgaaatatcttataatgacttgataacttactttccagataggaaataccataaatatatttataaagtatttgaacatgtagatttatcggaggaattaagtatggaattccatgatacaactctgagagatttagtctatcttagattgtacaagtattccaagtgtatacggccgtgttataaattaggagataatctaaaaggcatagttgttataaaggacaggaatatttatattagggaagcaaatgatgacttgatagaatatctcctcaaggaatacactcctcagatttatacatattctaatgagcgcgtccccataactggttcaaaattaattctttgtggattttctcaagttacatttatggcgtatacaacgtcgcatataacaacaaataaaaaggtagatgttctcgtttccaaaaaatgtatagatgaactagtcgatccaataaattatcaaatacttcaaaatttatttgataaaggaagcggaacaataaacaaaatactcaggaagatattttattcggtaacaggtggccaaactccataggtagctttttctatttcggattttagaatttccaaattcaccagcgatttatcggttttggtgaaatccaaggatttattaatgtccacaaatgccatttgttttgtctgtggattgtatttgaaaatggaaacgatgtagttagatagatgcgctgcgaagtttcctattagggttccgcgcttcacgtcacccagcatacttgaatcaccatcctttaaaaaaaatgataagatatcaacatggagtatatcatactcggattttaattcttctactgcatcactgacattttcacaaatactacaatacggtttaccgaaaataatcagtacgttcttcatttatgggtatcaaaaacttaaaatcgttactgctggaaaataaatcactgacgatattagatgataatttatacaaagtatacaatggaatatttgtggatacaatgagtatttatatagccgtcgccaattgtgtcagaaacttagaagagttaactacggtattcataaaatacgtaaacggatgggtaaaaaagggagggcatgtaaccctttttatcgatagaggaagtataaaaattaaacaagacgttagagacaagagacgtaaatattctaaattaaccaaggacagaaaaatgttagaattagaaaagtgtacatccgaaatacaaaatgttaccggatttatggaagaagaaataaaggcagaaatgcaattaaaaatcgataaactcacatttcaaatatatttatctgattctgataacataaaaatatcattgaatgagatactaacacatttcaacaataatgagaatgttacattattttattgtgatgaacgagacgcagaattcgttatgtgtctcgaggctaaaacacatttctctaccacaggagaatggccgttgataataagtaccgatcaggatactatgctatttgcatctgctgataatcatcctaagatgataaaaaacttaactcaactgtttaaatttgttccctcggcagaggataactatttagcaaaattaacggcgttagtgaatggatgtgatttctttcctggactctatggggcatctataacacccaccaacttaaacaaaatacaattgtttagtgattttacaatcgataatatagtcactagtttggcaattaaaaattattatagaaagactaactctaccgtagacgtgcgtaatattgttacgtttataaacgattacgctaatttagacgatgtctactcgtatattcctccttgtcaatgcactgttcaagaatttatattttccgcattagatgaaaaatggaatgaatttaaatcatcttatttagaaagcgtgccgttaccctgccaattaatgtacgcgttagaaccacgcaaggagattgatgtttcagaagttaaaactttatcatcttatatagatttcgaaaatactaaatcagatatcgatgttataaaatctatatcctcgatcttcggatattctaacgaaaactgtaacacgatagtattcggcatctataaggataatttactactgagtataaataattcattttactttaacgatagtctgttaataaccaatactaaaagtgataatataataaatataggttactagattaaaaatggtgttccaactcgtgtgctctacatgcggtaaagatatttctcacgaacgatataaattgattatacgaaaaaaatcattaaaggatgtactcgtcagtgtaaagaacgaatgttgtaggttaaaattatctacacaaatagaacctcaacgtaacttaacagtgcaacctctattggatataaactaatatggatccggttaattttatcaagacatatgcgcctagaggttctattatttttattaattataccatgtcattaacaagtcatttgaatccatcgatagaaaaacatgtgggtatttattatggtacgttattatcggaacacttggtagttgaatctacctatagaaaaggagttcgaatagtcccattggatagtttttttgaaggatatcttagtgcaaaagtatacatgttagagaatattcaagttatgaaaatagcagctgatacgtcattaactttattgggtattccgtatggatttggtcataatagaatgtattgttttaaattggtagctgactgttataaaaatgccggtattgatacatcgtctaaacgaatattgggcaaagatatttttctgagccaaaacttcacagacgataatagatggataaagatatatgattctaataatttaacattttggcaaattgattaccttaaagggtgagttaatatgcataactactcctccgttgttttttccctcgttctttttcttaacgttgtttgccatcactctcataatgtaaagatattctaaaatggtaaacttttgcatatcggacgcagaaattggtataaatgttgtaattgtattatttcccgtcaatggactagtcacagctccatcagttttatatcctttagagtatttctcactcgtgtctaacattctagagcattccatgatctgtttatcgttgatattggccggaaagatagattttttattttttattatattactattggcaattgtagatataacttctggtaaatatttttctaccttttcaatctcttctattttcaagccggctatatattctgctatattgttgctagtatcaataccttttctggctaagaagtcatatgtggtattcactatatcagttttaactggtagttccattagcctttccacttctgcagaataatcagaaattggttctttaccagaaaatccagctactataataggctcaccgatgatcattggcaaaatcctatattgtaccagattaatgagagcatatttcatttccaataattctgctagttcttgagacattgatttatttgatgaatctagttggttctctagatactctaccatttctgccgcatacaataacttgttagataaaatcagggttatcaaagtgtttagcgtggctagaatagtgggcttgcatgtattaaagaatgcggtagtatgagtaaaccgttttaacgaattatatagtctccagaaatctgtggcgttacatacatgagccgaatgacatcgaagattgtccaatatttttaatagctgctctttgtccattatttctatatttgactcgcaacaattgtagataccattaatcaccgattcctttttcgatgccggacaatagcacaattgtttagctttggactctatgtattcagaattaatagatatatctctcaatacagattgcactatacattttgaaactatgtcaaaaattgtagaacgacgctgttctgcagccatttaactttaaataatttacaaaaatttaaaatgagcatccgtataaaaatcgataaactgcgccaaattgtggcatatttttcagagttcagtgaagaagtgtctataaatgtagactcgacggatgagttaatgtatatttttgccgccttgggcggatctgtaaacatttgggcaattatacctctaagtgcatcagtgttttaccgaggagccgaaaatattgtgtttaatcttcctgtgtccaaggtaaaatcgtgtttgtgtagttttcacaatgatgccatcatagatatagaacctgatctggaaaataatctagtaaaactttctagttatcatgtagtaagtgtcgattgtaacaaggaactgatgcctattaggacagatactactatttgtctaagtatagatcaaaagaaatcttacgtgtttaattttcacaagtatgaagaaaaatgttgtggtagaaccgtcattcatctagaatggttgttgggctttatcaagtgtattagtcagcatcagcatctggctattatgtttaaagatgacaatattattatgaagactcctggtaatactgatgcattttccagggaatattctatgactgaatgttctcaagaactacaaaagttttctttcaaaatagctatctcgtctctcaacaaactacgaggattcaaaaagagagtcaatgtttttgaaactagaatcgtaatggataatgacgataacattctaggaatgttgttttcggatagagttcaatcctttaagatcaacatctttatggcgtttttagattaatactttcaatgagataaatatgggtggcggagtaagtgttgagctccctaaacgggatccgcctccgggagtacccactgatgagatgttattaaacgtggataaaatgcatgacgtgatagctcccgctaagcttttagaatatgtgcatataggaccactagcaaaagataaagaggataaagtaaagaaaagatatccagagtttagattagtcaacacaggacccggtggtctttcggcattgttaagacaatcgtataatggaaccgcacccaattgctgtcgcacttttaatcgtactcattattggaagaaggatggaaagatatcagataagtatgaagagggtgcagtattagaatcgtgttggccagacgttcacgacactggaaaatgcgatgttgatttattcgactggtgtcagggggatacgttcgatagaaacatatgccatcagtggatcggttcagcctttaataggagtgatagaactgtagagggtcaacaatcgttaataaatctgtataataagatgcaaacattatgtagtaaagatgctagtgtaccaatatgcgaatcatttttgcatcatttacgcgcacacaatacagaagatagcaaagagatgatcgattatattctaagacaacagtctgcggactttaaacagaaatatatgagatgtagttatcccactagagataagttagaagagtcattaaaatatgcggaacctcgagaatgttgggatccagagtgttcgaatgccaatgttaatttcttactaacacgtaattataataatttaggactttgcaatattgtacgatgtaataccagcgtgaacaacttacagatggataaaacttcctcattaagattgtcatgtggattaagcaatagtgatagattttctactgttcccgtcaatagagcaaaagtagttcaacataatattaaacattcgttcgacctaaaattgcatttgatcagtttattatctcttttggtaatatggatactaattgtagctatttaaatgggtgccgcggcaagcatacagacgacggtgaatacactcagcgaacgtatctcgtctaaattagaacaagaagcgaacgctagtgctcaaacaaaatgtgatatagaaatcggaaatttttatatccgacaaaaccatggatgtaacctcactgttaaaaatatgtgctctgcggacgcggatgctcagttggatgctgtgttatcagccgctacagaaacatatagtggattaacaccggaacaaaaagcatacgtgccagctatatttactgctgcgttaaacattcagacgagtgtaaacactgttgttagagattttgaaaattatgtgaaacagacttgtaattctagcgcggtcgtcgataacaaattaaagatacaaaacgtaatcatagatgaatgttacggagccccaggatctccaacaaatttggaatttattaatacaggatctagcaaaggaaattgtgccattaaagcgttgatgcaattgacgactaaggccactactcaaatagcacctagacaagttgctggtacaggagttcagttttatatgattgttatcggtgttataatattggcagcgttgtttatgtactatgccaagcgtatgttgttcacatccaccaatgataaaatcaaacttattttagccaataaggaaaacgtccattggactacttacatggacacattctttagaacttctccgatggttattgctaccacggatatgcaaaactgaaaatatattgataatattttaatagattaacatggaagttatcgctgatcgtctagacgatatagtgaaacaaaatatagcggatgaaaaatttgtagattttgttatacacggtctagagcatcaatgtcctgctatacttcgaccattaattaggttgtttattgatatactattatttgttatagtaatttatatttttacggtacgtctagtaagtagaaattatcaaatgttgttggtggtgctagtcatcacattaactattttttattactttatactataatagtactagactgacttctaacaaacatctcacctgccataaataaatgcttgatattaaagtcttctatttctaacactattccatctgtggaaaataatactctgacattatcgctaattgacacatcggtgagtgatatgcctataaagtaataatcttctttgggcacatataccagtgtaccaggttctaacaacctatttactggtgctcctgtagcatactttttctttaccttgagaatatccatcgtttgcttggtcaatagcgatatgtgattttttatcaaccactcaaaaaagtaattggagtgttcatatcctctacgggctattgtctcatggccgtgtatgaaatttaagtaacacgactgtggtagatttgttctatagagccgattgccgcaaatagatagaactaccaatatgtctgtacaaatgttaaacattaattgattaacagaaaaaacaatgttcgttctgggaatagaaaccagatcaaaacaaaattcgttagaatatatgccacgtttatacatggaatataaaataactacagtttgaaaaataacagtatcatttaaacatttaacttgcggggttaatctcacaactttactgtttttgaactgttcaaaatatagcatcgatccgtgagaaatacgtttagccgcctttaatagaggaaatcccaccgcctttctggatctcaccaacgacgatagttctgaccagcaactcatttcttcatcatccacctgttttaacatataataggcaggagatagatatccgtcattgcaatattccttctcgtaggcacacaatctaatattgataaaatctccattctcttctctgcatttattatcttgtctcggtggctgattaggctgtggtcttggtttaggccttggtctatcgttgttgaatctattttggtcattaaatctttcatttcttcctggtatatttctatcacctcgtttggttggatttttgtctatattatcgtttgtaacatcggtacgggtattcatttatcacaaaaaaaacttctctaaatgagtctactgctagaaaacctcatcgaagaagataccatattttttgcaggaagtatatctgagtatgatgatttacaaatggttattgccggcgcaaaatccaaatttccaagatctatgctttctatttttaatatagtacctagaacgatgtcaaaatatgagttggagttgattcataacgaaaatatcacaggagcaatgtttaccacaatgtataatataagaaacaatttgggtctaggagatgataaactaactattgaagccattgaaaactatttcttggatcctaacaatgaagttatgcctcttattattaataatacggatatgactgccgtcattcctaaaaaaagtggtaggagaaagaataagaacatggttatcttccgtcaaggatcatcacctatcttgtgtattttcgaaactcgtaaaaagattaatatttataaagaaaatatggaatccgcgtcgactgagtatacacctatcggagacaacaaggctttaatatctaaatatgcgggaattaatgtcctgaatgtgtattctccttccacatccataagattgaatgccatttacggattcaccaataaaaataaactagagaaacttagtactaataaggaactagaatcgtatagttctagccctcttcaagaacccattaggttaaatgattttctgggactattggaatgtgttaaaaagaatattcctctaacagatattccgacaaaggattgattactataaatggagaatgttcctaatgtatactttaatcctgtgtttatagagcccacgtttaaacattctttattaagtgtttataaacacagattaatagttttatttgaagtattcgttgtattcattctaatatatgtattttttagatctgaattaaatatgttcttcatgcctaaacgaaaaatacccgatcctattgatagattacgacgtgctaatctagcgtgtgaagacgataaattaatgatctatggattaccatggatgacaactcaaacatctgcgttatcaataaatagtaaaccgatagtgtataaagattgtgcaaagcttttgcgatcaataaatggatcacaaccagtatctcttaacgatgttcttcgcagatgatgattcattttttaagtatttggctagtcaagatgatgaatcttcattatctgatatattgcaaatcactcaatatctagactttctgttattattattgatccaatcaaaaaataaattagaagctgtgggtcattgttatgaatctctttcagaggaatacagacaattgacaaaattcacagactttcaagattttaaaaaactgtttaacaaggtccctattgttacagatggaagggtcaaacttaataaaggatatttgttcgactttgtgattagtttgatgcgattcaaaaaagaatcctctctagctaccaccgcaatagatcctgttagatacatagatcctcgtcgtgatatcgcattttctaacgtgatggatatattaaagtcgaataaagtgaacaataattaattctttattgtcatcatgaacggcggacatattcagttgataatcggccccatgttttcaggtaaaagtacagaattaattagacgagttagacgttatcaaatagctcaatataaatgcgtgactataaaatattctaacgataatagatacggaacgggactatggacgcatgataagaataattttgaagcattggaagcaactaaactatgtgatgtcttggaatcaattacagatttctccgtgataggtatcgatgaaggacagttctttccagacattgtttaattctgtgagcgtatggcaaacgaaggaaaaatagttatagtagccgcactcgatgggacatttcaacgtaaaccgtttaataatattttgaatcttattccattatctgaaatggtggtaaaactaactgctgtgtgtatgaaatgctttaaggaggcttccttttctaaacgattgggtgaggaaaccgagatagagataataggaggtaatgatatgtatcaatcggtgtgtagaaagtgttacgtcggctcataatattatattttttatctaaaaaactaaaaataaacattgattaaattttaatataatacttaaaaatggatgttgtgtcgttagataaaccgtttatgtattttgaggaaattgataatgagttagattacgaaccagaaagtgcaaatgaggtcgcaaaaaaactgccgtatcaaggacagttaaaactattactaggagaattattttttcttagtaagttacagcgacacggtatattagatggtgccaccgtagtgtatataggatcggctcctggtacacatatacgttatttgagagatcatttctataatttaggagtgatcatcaaatggatgctaattgacggccgccatcatgatcctattttaaatggattgcgtgatgtaactctagtgactcggttcgttgatgaggaatatctacgatccatcaaaaaacaactgcatccttctaagattattttaatttctgatgtaagatccaaacgaggaggaaatgaacctagtacggcggatttactaagtaattacgctctacaaaatgtcatgattagtattttaaaccccgtggcatctagtcttaaatggagatgcccgtttccagatcaatggatcaaggacttttatatcccacacggtaataaaatgttacaaccttttgctccttcatattcagctgaaatgagattattaagtatttataccggtgagaacatgagactgactcgagttaccaaattagacgctgtaaattatgaaaaaaagatgtactaccttaataagatcgtccgtaacaaagtagttgttaactttgattatcctaatcaggaatatgactattttcacatgtactttatgctgaggaccgtgtactgcaataaaacatttcctactactaaagcaaaggtactatttctacaacaatctatatttcgtttcttaaatattccaacaacatcaactgaaaaagttagtcatgaaccaatacaacgtaaaatatctagcaaaaattctatgtctaaaaacagaaatagcaagagatccgtacgcggtaataaatagaaacgtactactgagatatactaccgatatagagtataatgatttagttactttaataaccgttagacataaaattgattctatgaaaactgtgtttcaggtatttaacgaatcatccataaattatactccggttgatgatgattatggagaaccaatcattataacatcgtatcttcaaaaaggtcataacaagtttcctgtaaattttctatacatagatgtggtaatatctgacttatttcctagctttgttagactagatactacagaaactaatatagttaatagtgtactacaaacaggcgatggtaaaaagactcttcgtcttcccaaaatgttagagacggaaatagttgtcaagattctctatcgccctaatataccattaaaaattgttagatttttccgcaataacatggtaactggagtagagatagccgatagatctgttatttcagtcgctgattaatcaattagtagagatgagataagaacattataataatcaataatatatcttatatcttatatcttatatcttatatcttgtttagaaaaatgctaatattaaaatagctaacgctagtaatccaatcggaagccatttgatatctataatagggtatctaatttcctgatttaaatagcggacagctatattctcggtagctactcgtttggaatcacaaacattatttacatctaatttactatctgtaatggaaacgtttcccaatgaaatggtacaatccgatacattgcattttgttatatttttttttaaagaggctggtaacaacgcatcgcttcgtttacatggctcgtaccaacaataatagggtaatcttgtatctattcctatccgtactatgcttttatcaggataaatacatttacatcgtatatcgtctttgttagcatcacagaatgcataaatttgttcgtccgtcatgataaaaatttaaagtgtaaatataactattatttttatagttgtaataaaaagggaaatttgattgtatactttcggttctttaaaagaaactgacttgataaaaatggctgtaatctctaaggttacgtatagtctatatgatcaaaaagagattaatgctacagatattatcattagtcatgttaaaaatgacgacgatatcggtaccgttaaagatggtagactaggtgctatggatggggcattatgtaagacttgtgggaaaacggaattggaatgtttcggtcactggggtaaagtaagtatttataaaactcatatagttaagcctgaatttatttcagaaattattcgtttactgaatcatatatgtattcactgcggattattgcgttcacgagaaccgtattccgacgatattaacctaaaagagttatcgggacacgctcttaggagattaaaggataaaatattatccaagaaaaagtcatgttggaacagtgaatgtatgcaaccgtatcaaaaaattactttttcaaagaaaaaggtttgtttcgtcaacaagttggatgatattaacgttcctaattctctcatctatcaaaagttaatttctattcatgaaaagttttggccattattagaaattcatcaatatccagctaacttattttatacagactactttcccatccctccgttgattattagaccggctattagtttttggatagatagtatacccaaagagaccaatgaattaacttacttattaggtatgatcgttaagaattgtaacttgaatgctgatgaacaggttatccagaaggcggtaatagaatacgatgatattaaaattatttctaataacactaccagtatcaatttatcatatattacatccggcaaaaataatatgattagaagttatatcgtcgcccgacgaaaagatcagaccgctagatctgtaattggtcccagtacatctatcaccgttaatgaggtaggaatgcccgcatatattagaaatacacttacagaaaagatatttgttaatgcctttacagtggataaagttaaacaactattagcgtcaaaccaagttaaattttactttaataaacgattaaaccaattaacaagaatacgccaaggaaagtttattaaaaataaaatacatttattgcctggtgattgggtagaagtagctgttcaagaatatacaagtattatttttggaagacagccgtctctacatagatacaacgtcatcgcttcatctatcagagctaccgaaggagatactatcaaaatatctcccggaattgccaactctcaaaatgctgatttcgacggggatgaggaatggatgatattagaacaaaatcctaaagctgtaattgaacaaagtattcttatgtatccgacgacgttactcaaacacgatattcatggagcccccgtttatggatctattcaagatgaaatcgtagcagcgtattcattgtttaggatacaagatctttgtttagatgaagtattgaacatcttggggaaatatggaagagagttcgatcctaaaggtaaatgtaaattcagcggtaaagatatctatacttacttgataggtgaaaagattaattatccgggtctcttaaaggatggtgaaattattgcaaacgacgtagatagtaattttgttgtggctatgaggcatctgtcattggctggactcttatccgatcataagtcgaacgtggaaggtatcaactttattatcaagtcatcttatgtttttaagagatatctatctatttacggttttggggtgacattcaaagatctgagaccaaattcgacgttcactaataaattggaggccatcaacgtagaaaaaatagaacttatcaaagaagcatacgccaaatatctcaacgatgtaagagacgggaaaatagttccattatctaaagctttagaggcggactatgtggaatccatgttatccaacttgacaaatcttaatatccgagagatagaagaacatatgagacaaacgctgatagatgatccagataataacctcctgaaaatggccaaagcgggttataaagtaaatcccacagaactaatgtatattctaggtacgtatggacaacaaaggattgatggtgaaccagcagagactcgagtattgggtagagttttaccttactatcttccagactctaaggatccagaaggaagaggttatattcttaattctttaacaaaaggattaacgggttctcaatattacttttcgatgctggttgcaagatctcaatctactgatatcgtctgtgaaacatcacgtaccggaacactggctagaaaaatcattaaaaagatggaggatatggtggtcgacggatacggacaagtagttataggtaatacgctcatcaagtacgccgccaattataccaaaattctaggctcagtatgtaaacctgtagatcttatctatccagatgagtccatgacttggtatttggaaattagtgctctgtggaataaaataaaacagggattcgtttactctcagaaacagaaacttgcaaagaagacattggcgccgtttaatttcctagtattcgtcaaacccaccactgaggataatgctattaaggttaaggatctgtacgatatgattcataacgtcattgatgatgtgagagagaaatacttctttacggtatctaatatagattttatggagtatatattcttgacgcatcttaatccttctagaattagaattacaaaagaaacggctatcactatctttgaaaagttctatgaaaaactcaattatactctaggtggtggaactcctattggaattatttctgcacaggtattgtctgagaagtttacacaacaagccctgtccagttttcacactactgaaaaaagtggtgccgtcaaacaaaaacttggtttcaacgagtttaataacttgactaatttgagtaagaataagaccgaaattatcactctggtatccgatgatatctctaaacttcaatctgttaagattaatttcgaatttgtatgtttgggagaattaaatccagacatcactcttcgaaaagaaacagataggtatgtagtagatataatagtcaatagattatacatcaagagagcagaaataaccgaattagtcgtcgaatatatgattgaacgatttatctcctttagcgtcattgtaaaggaatggggtatggagacattcattgaggacgaggataatattagatttactgtctatctaaatttcgttgaaccggaagaattgaatcttagtaagtttatgatggttcttccgggggcagccaacaagggaaagattagtaaattcaagattcctatctctgattatacgggttatgacgacttcaatcaaacaaaaaagctcaataagatgactgtagaactcatgaatctaaaagaattgggttctttcgatttggaaaacgtcaacgtgtatcctggagtatggaatacatacgatatcttcggtatcgaggccgctcgtgaatacttgtgcgaagccatgttaaacacctatggagaagggttcgattatctgtatcagccttgtgatcttctcgctagtttactatgtgctagttacgaaccagaatcagtgaataaattcaagttcggcgcagctagtactcttaagagagctacgttcggagacaataaagcattgttaaacgcggctcttcataaaaagtcagaacctattaacgataatagtagctgccacttttttagcaaggtccctaatataggaactggatattacaaatactttatcgacttgggtcttctcatgagaatggaaaggaaactatctgataagatatcttctcaaaagatcaaggaaatggaagaaacagaagacttttaattcttatcaataacatatttttctatgatctgtcttttaaacgatggattttccacaaatgcgcctctcaagtccctcatagaatgatacacgtataaaaaatatagcataggcaatgactccttatttttagacattagatatgccaaaatcatagccccgcttctatttactcccgcagcacaatgaaccaacacgggctcgtttcgttgatcacatttagataaaaaggcggttacgtcgtcaaaatatttactaatatcggtagttgtatcatctaccaacggtatatgaataatattaatattagagttaggtaatgtatatttatccatcgtcaaatttaaaacatatttgaacttaacttcagatgatggtgcatccatagcatttttataatttcccaaatacacattattggttacccttgtcattatagtgggagatttggctctgtgcatatctccagttgaacgtagtagtaagtatttatacaaacttttcttatccatttataacgtacaaatggataaaactactttatcggtaaacgcgtgtaatttagaatacgttagagaaaaggctatagtaggcgtacaagcagccaaaacatcaacacttatattctttgttattatattggcaattagtgcgctattactctggtttcagacgtctgataatccagtctttaatgaattaacgagatatatgcgaattaaaaatacggttaacgattggaaatcattaacggatagcaaaacaaaattagaaagtgatagaggtagacttctagccgctggtaaggatgatatattcgacttcaaatgtgtggatttcggcgcctattttatagctatgcgattggataagaaaacatatctgccgcaagctattaggcgaggtactggagacgcgtggatggttaaaaaggcggcaaaggtcgatccatctgctcaacaattttgtcagtatttgataaaacacaagtctaataatgttattacttgtggtaatgagatgttaaatgaattaggttatagcggttattttatgtcaccgcattggtgttccgattttagtaatatggaatagtgttagataaatgcggtaacgaatgttcctgtaaggaaccataacagcttagatttaacgttaaagatgagcataaacataataaacaaaattacaatcaaacctataacattaatatcaaacaatccaaaaaatgaaatcagtggagtagtaaacgcgtacataactcctggataacgtttagcagctgccgttcctattctagaccaaaaattcggtttcatgttttcgaaacggtattctgcaacaagtcgaggatcgtgttctacatatttggcggcgttatccagtatctgcctattgatcttcatttcgttttcgattctggctatttcaaaataaaatcccgatgatagacctccagactttataatttcatctacgatgttcagcgccgtagtaactctaataatataggctgataagctaacatcataccctcctgtatatgtgaatatggcatgatttttgtccattacaagctcggttttaactttattgcctgtaataatttctctcatctgtaggatatctatttttttgtcatgcattgccttcaagacgggacgaagaaacgtaatatcctcaataacgttatcgttttctacaataactacatattctacctttttattttctaactcggtaaaaaaattagaatcccatagggctaaatgtctagcgatatttcttttcgtttcctctgtacacatagtgttacaaaaccctgaaaagaagtgagtatacttgtcatcatttctaatgtttcctccagtccactgtataaacgcataatccttgtaatgatctggatcatccttgactaccacaacatttcttttttctggcataacttcgttgtcctttacatcatcgaacttctgatcattaatatgctcatgaacattaggaaatgtttctgatggaggtctatcaataactggcacaacaataacaggagttttcaccgccgccatttagttattgaaattaatcatatacaactctttaatacgagttatattttcgtctatccattgtttcacattgacatatttcgacaaaaagatataaaatgcgtattccaatgcttctctgtttaatgaattactaaaatatacaaacacgtcactgtctggcaataaatgatatcttagaatattgtaacaatttattttgtattgcacatgttcgtgatctatgagttcttcttcgaatggcataggatctccgaatctgaaaacgtataaataggagttagaataataatatttgagagtattggtaatatataaactctttagcggtataattagtttttttctctcaatttctatttttagatgtgatggaaaaatgactaattttgtagcattagtatcatgaactctaattaaaatcttaatatcttcgtcacacgttagctctttgaagtttttaagagatgcatcagttggttctacagatggagtaggtgcaacaattttttgttctacacatgtatgtactggagccattgttttaactataatggtgcttgtatcgaaaaactttaatgcagatagcggaagctcttcgccgcgactttctacgtcgtaattgggttctaacgccgatctctgaatggatactagttttctaagttctaatgtgattctctgaaaatgtaaatccaattcctccggcattatagatgtgtatacatcggtaaataaaactatagtatccaacgatcccttctcgcaaattctagtcttaaccaaaaaatcgtatataaccacggagatggcgtatttaagagtggattcttctaccgttttgttcttggatgtcatataggaaactataaagtccgcactactgttaagaatgattactaacgcaactatatagtttaaattaagcattttggaaacataaaataactctgtagacgatacttgactttcgaataagtttgcagacaaacgaagaaagaacagacctctcttaatttcagaagaaaactttttttcgtattcctgacgtctagagtttatatcaataagaaagttaagaattagtcggttaatgttgtatttcattacccaagtttgagatttcataatattatcaaaagacatgataatattaaagataaagcgctgactatgaacgaaatagctatatggttcgctcaagaatatagtcttgttaaacgtggaaacgataactgtatttttaatcacgtcagcggcatctaaattaaatataggtatatttattccacacactctacaatatgccacaccatcttcataataaataaattcgttagcaaaattattaattttagtgaaatagttagcgtcaactttcatagcttccttcaatctaatttgatgctcacacggtgcgaattccactctaacatcccttttccatgcctcaggttcatcgatctctataatatctagttttttgcgtttcacaaacacaggctcgtctctcgcgatgagatctgtatagtaactatgtaaatgataactagatagaaagatgtagctatatagatgacgatcctttaagagaggtataataactttaccccaatcagatagactgttgttatggtcttcggaaaaagaatttttataaatttttccagtattttccaaatatacgtacttaacatctaaaaaatccttaatgataataggaatggataatccgtctattttataaagaaatacatatcgcacattatacttttttttggaaatgggaataccgatgtgtctacataaatatgcaaagtctaaatattttttagagaatcttagttggtccaaattcttttccaagtacggtaatagatttttcatattgaacggtatcttcttaatctctggttctagttccgcattaaatgatgaaactaagtcactatttttataactaacgattacatcacctctaacatcatcatttaccagaatactgatcttcttttgtcgtaaatacatgtctaatgtgttaaaaaaaagatcatacaagttatacgtcatttcatctgtggtattcttgtcattgaaggataaactcgtactaatctcttctttaacagcctgttcaaatttatatcctatatacgaaaaaatagcaaccagtgtttgatcatccgcgtcaatattctgttctatcgtagtgtataacaatcgtatatcttcttctgtgatagtcgatacgttataaaggttgataacgaaaatatttttatttcgtgaaataaagtcatcgtaggattttggacttatattcgcgtctagtagatatgcttttatttttggaatgatctcaattagaatagtctctttagagtccatttaaagttacaaacaactaggaaattggtttatgatgtataatttttttagtttttatagattctttattctatacttaaaaaatgaaaataaatacaaaggttcttgagggttgtgttaaattgaaagcgagaaataatcataaattatttcattatcgcgatatccgttaagtttgtatcgtaatggcgtggtcaattacgaataaagcggatactagtagcttcacaaagatggctgaaatcagagctcatctaaaaaatagcgctgaaaataaagataaaaacgaggatattttcccggaagatgtaataattccatctactaagcccaaaaccaaacgagccactactcctcgtaaaccagcggctactaaaagatcaaccaaaaaggaggaagtggaagaagaagtagttatagaggaatatcatcaaacaactgaaaaaaattctccatctcctggagtcagcgacattgtagaaagcgtggccgctgtagagctcgatgatagcgacggggatgatgaacctatggtacaagttgaagctggtaaagtaaatcatagtgctagaagcgatctctctgacctaaaggtggctaccgacaatatcgttaaagatcttaagaaaattattactagaatctctgcagtatcgacggttctagaggatgttcaagcagctggtatctctagacaatttacttctatgactaaagctattacaacactatctgatctagtcaccgagggaaaatctaaagttgttcgtaaaaaagttaaaacttgtaagaagtaaatgcgtgcacttttttataaagatggtaaactctttaccgataataattttttaaatcctgtatcagacgataatccagcgtatgaggttttgcaacatgttaaaattcctactcatttaacagatgtagtagtatatgaacaaacgtgggaggaggcgttaactagattaatttttgtgggaagcgattcaaaaggacgtagacaatacttttacggaaaaatgcatgtacagaatcgcaacgctaaaagagatcgtatttttgttagagtatataacgttatgaaacgaattaattgttttataaacaaaaatataaagaaatcgtccacagattccaattatcagttggcggtttttatgttaatggaaactatgttttttattagatttggtaaaatgaaatatcttaaggagaatgaaacagtagggttattaacactaaaaaataaacacatagaaataagtcccgatgaaatagttatcaagtttgtaggaaaggacaaagtttcacatgaatttgttgttcataagtctaatagactatataaaccgctattgaaactgacggatgattctagtcccgaagaatttctgttcaacaaactaagtgaacgaaaggtatacgaatgtatcaaacagtttggtattagaatcaaggatctccgaacgtatggagtcaattatacgtttttatataatttttggacaaatgtaaagtccatatctcctcttccgtcaccaaaaaagttaatagcgttaactatcaaacaaactgctgaagtggtaggtcatactccatcaatttcaaaaagagcttatatggcaacgactattttagaaatggtaaaggataaaaattttttagatgtagtatctaaaactacgttcgatgaattcctatctatagtcgtagatcacgttaaatcatctacggatggatgatatagatctttacacaaataattacaagaccgataaatggaaatggataagcgtatgaaatctctcgcaatgacagctttcttcggagagctaaacacattagatattatggcattgataatgtctatatttaaacgccatccaaacaataccattttttcagtggataaggatggtcagtttatgattgatttcgaatacgataattataaggcttctcaatatttggatctgaccctcactccgatatttggagatgaatgcaagactcacgcatcgagtatagccgaacaattggcgtgtgcggatattattaaagaggatattagcgaatatatcaaaactactccccgtcttaaacgatttataaaaaaataccgcaatagatcagatactcgcatcagtcgagatacagaaaagcttaaaatagctctagctaaaggcatagattacgaatatataaaagacgcttgttaataagtaaatgaaaaaaaactagtcgtttataataaaacacgatatggatgccaacgtagtatcatcttctactattgcgacgtatatagacgctttagcgaagaatgcttcagaattagaacagaggtctaccgcatacgaaataaataatgaattggaactagtatttattaagccgccattgattactttgacaaatgtagtgaatatctctacgattcaggaatcgtttattcgatttaccgttactaataaggaaggtgttaaaattagaactaagattccattatctaaggtacatggtctagatgtaaaaaatgtacagttagtagatgctatagataacatagtttgggaaaagaaatcattagtgacggaaaatcgtcttcacaaagaatgcttgttgagactatcgacagaggaacgtcatatatttttggattacaagaaatatggatcctctatccgactagaattagtcaatcttattcaagcaaaaacaaaaaactttacgatagactttaagctaaaatattttctaggatccggtgcccaatctaaaagttctttattacacgctattaatcatccaaagtcaaggcctaatacatctctggaaatagaattcacacctagagacaatgaaacagttccatatgatgaactaataaaggaattgacgactctatcacgtcatatatttatggcttctccagagaatgtaattctttctccgcctattaacgcgcctataaaaacctttatgttgcctaaacaagatatagtaggtttggatctggaaaatctatatgccgtaactaagactgacggcattcctataactatcagagttacatcaaacgggttgtattgttattttacacatcttggttatattattagatatcctgttaagagaataatagattccgaagtagtagtctttggtgaggcagttaaggataagaactggaccgtatatctcattaagctaatagagcccgtgaatgctatcagtgatagactagaagaaagtaagtatgttgaatctaaactagtggatatttgtgatcggatagtattcaagtcaaagaaatacgaaggtccgtttactacaactagtgaagtcgtcgatatgttatctacatatttaccaaagcaaccagaaggtgttattctgttctattcaaagggacctaaatctaacattgattttaaaattaaaaaggaaaatactatagaccaaactgcaaatgtagtatttaggtacatgtccagtgaaccaattatctttggagaatcgtctatctttgtagagtataagaaatttagcaacgataaaggctttcctaaagaatatggttctggtaagattgtgttatataacggcgttaattatctaaataatatctattgtttggaatatattaatacacataatgaagtgggtattaagtccgtggttgtacctattaagtttatagcagaattcttagttaatggagaaatacttaaacctagaattgataaaaccatgaaatatattaactcagaagattattatggaaatcaacataatatcatagtcgaacatttaagagatcaaagcatcaaaataggagatatctttaacgaggataaactatcggatgtgggacatcaatacgccaataatgataaatttagattaaatccagaagttagttattttacgaataaacgaactagaggaccgttgggaattttatcaaactacgtcaagactcttcttatttctatgtattgttccaaaacatttttagacgattccaacaaacgaaaggtattggcgattgattttggaaacggtgctgacctggaaaaatacttttatggagagattgcgttattggtagcgacggatccggatgctgatgctatagctagaggaaatgaaagatacaacaaattaaactctggaattaaaaccaagtactacaaatttgactacattcaggaaactattcgatccgatacatttgtctctagtgtcagagaagtattctattttggaaagtttaatatcatcgactggcagtttgctatccattattcttttcatccgagacattatgctaccgtcatgaataacttatccgaactaactgcttctggaggcaaggtattaatcactaccatggacggagacaaattatcaaaattaacagataaaaagacttttataattcataagaatttacctagtagcgaaaactatatgtctgtagaaaaaatagctgatgatagaatagtggtatataatccatcaacaatgtctactccaatgactgaatacattatcaaaaagaacgatatagtcagagtgtttaacgaatacggatttgttcttgtagataacgttgatttcgctacaattatagaacgaagtaaaaagtttattaatggcgcatctacaatggaagatagaccgtctacaaaaaactttttcgaactaaatagaggagccattaaatgtgaaggtttagatgtcgaagacttacttagttactatgttgtttatgtcttttctaagcggtaaataataatatggtatgggttctgatatccccgttctaaatgcattaaataattccaatagagcgatttttgttcctataggaccttccaactgtggatactctgtattgttaatagatatattaatacttttgtcgggtaacagaggttctacgtcttctaaaaataaaagttttataacatctggcctgttcataaataaaaacttggcgattctatatatactcttattatcaaatctagccattgtcttatagatgtgagctactgtaggtgtaccatttgattttctttctaatactatatatttctctcgaagaagttcttgcacatcatctgggaataaaatactactgttgagtaaatcagttattttttttatatcgatattgatggacatttttatagttaaggataataagtatcccaaagtcgataacgacgataacgaagtatttatacttttaggaaatcacaatgactttatcagattaaaattaacaaaattaaaggagcatgtatttttttctgaatatattgtgactccagatacatatggatctttatgcgtcgaattaaatgggtctagttttcagcacggcggtagatatatagaggtggaggaatttatagatgctggaagacaagttagatggtgttctacatccaatcatatatctgaagatatacccgaagatatacacactgataaatttgtcatttatgatatatacacttttgattcgttcaagaataaacgattggtatttgtacaggtacctccgtcgttaggagatgatagtcatttgactaatccgttattgtctccgtattatcgtaattcagtagccagacaaatggtcaatgatatgatttttaatcaagattcatttttaaaatatttattagaacatctgattagaagccactatagagtttctaaacatataacaatagttagatacaaggataccgaagaattaaatctaacgagaatatgttataatagagataagtttaaggcgtttgtattcgcttggtttaacggcgtttcggaaaatgaaaaggtactagatacgtataaaaaggtatctaatttgatataatgaattcagtgactgtatcacacgcgccatatactattacttatcacgatgattgggaaccagtaatgagtcaattggtagagttttataacgaagtagccagttggctgctacgagacgagacgtcgcctattcctgataagttctttatacagttgaaacaaccgcttagaaataaacgagtatgtgtgtgcggtatagatccgtatccgaaagatggaactggtgtaccgttcgaatcaccaaattttacaaaaaaatcaattaaggagatagcttcatctatatctagattaaccggagtaattgattataaaggttataaccttaatataatagacggggttataccctggaattattacttaagttgtaaattaggagaaacaaaaagtcacgcgatctactgggataagatttccaagttactgctgcagcatataactaaacacgttagtgttctttattgtttgggtaaaacagatttctcgaatatacgggcaaagttagaatccccggtaactaccatagtcggatatcatccagcggctagagaccgccaattcgagaaagatagatcatttgaaattatcaacgttttactggaattagacaacaaggcacctataaattgggctcaagggtttatttattaatgctttagtgaaattttaacttgtgttctaaatggatgcggctattagaggtaatgatgttatctttgttcttaagactataggtgtcccgtcagcgtgcagacaaaatgaagatccaagatttgtagaagcatttaaatgcgacgagttagaaagatatattgagaataatccagaatgtacactattcgaaagtcttagggatgaggaagcatactctatagtcagaattttcatggatgtagatttagacgcgtatctagacgaaatagattatttaacggctattcaagattttattatcgaggtgtcaaactgtgtagctagattcgcgtttacagaatgcggcgccattcatgaaaatgtaataaaatccatgagatctaatttttcattgactaagtctacaaatagagataaaacaagttttcatattatctttttagacacgtataccactatggatacattgatagctatgaaacgaacactattagaattaagtagatcatctgaaaatccactaaccagatcgatagacactgccgtatataggagaaaaacaactcttcgggttgtaggtactaggaaaaatccaaattgcgacactattcatgtaatgcaaccaccgcatgataatatagaagattacctattcacttacgtggatatgaacaacaatagttattacttttctctacaacaacgattggaggatttagttcctgataagttatgggaaccagggtttatttcattcgaagacgctataaaaagagtttcaaaaatattcattaattctataataaactttaatgatctcgatgaaaataattttacaacggtaccactggtcatagattacgtaacaccttgtgcattatgtaaaaaacgatcgcataaacatccgcatcaactatcgttggaaaatggtgctattagaatttacaaaactggtaatccacatagttgtaaagttaaaattgttccgttggatggtaataaactgtttaatattgcacaaagaattttagacactaactctgttttattaaccgaacgaggagaccatatagtttggattaataattcatggaaatttaacagcgaagaacccttgataacaaaactaattttgtcaataagacatcaactacctaaggaatattcaagcgaattactctgtccgaggaaacgaaagactgtagaagctaacatacgagacatgttagtagattcagtggagaccgatacctatccggataaacttccgtttaaaaatggtgtattggacctggtagacggaatgttttactctggagatgatgctaaaaaatatacgtgtactgtatcaaccggatttaaatttgacgatacaaagttcgtcgaagacagtccagaaatggaagagttaatgaatatcattaacgatatccaaccattaacggatgaaaataagaaaaatagagagctatatgaaaaaacattatctagttgtttatgcggtgctaccaaaggatgtttaacattcttttttggagaaactgcaactggaaagtcgacaaccaaacgtttgttaaagtctgctatcggtgacctgtttgttgagacgggtcaaacaattttaacagatgtattggataaaggacctaatccatttatcgctaacatgcatttgaaaagatctgtattctgtagcgaactacctgattttgcatgtagtgggtcaaagaaaatcagatctgataatattaaaaagttgacagaaccttgtgtcattggaagaccgtgtttctccaataaaattaataatagaaaccatgcgacaatcattatcgatactaattacaaacctgtttttgataggatagataacgcattaatgagaagaattgccgtcgtgcgattcagaacacacttttctcaaccttctggtagagaggctgctgaaaataatgacgcgtacgataaagtcaaactattagacgaggggttagatggtaaaatacaaaataatagatatagattcgcatttctatacttgttggtgaaatggtacagaaaatatcatgttcctattatgaaactatatcctacacccgaagagattcctgactttgcattctatctcaaaataggtactctgttggtatctagctctgtaaagcatattccattaatgacggacctctccaaaaagggatatatattgtacgataatgtggtcactcttccgttgactactttccaacagaaaatatccaagtattttaattctagactatttggacacgatatagagagcttcatcaatagacataagaaatttgccaatgttagtgatgaatatctgcaatatatattcatagaggatatttcatctccgtaaatatatgctcatatatttatagaagatatcacatatctaaatgaataccggaatcatagatttatttgataatcatgttgatagtataccaactatattacctcatcagttagctactctagattatctagttagaactatcatagatgagaacagaagcgtgttattgttccatattatgggatcaggtaaaacaataatcgctttgttgttcgccttggtagcttccagatttaaaaaggtttacattctagtgccgaacatcaacatcttaaaaattttcaattataatatgggtgtagctatgaacttgtttaatgacgaattcatagctgagaatatctttattcattccacaacaagtttttattctcttaattataacgataacgtcattaattataacggattatctcgctacaataactctatttttatcgttgatgaggcacataatatctttgggaataatactggagaacttatgaccgtgataaaaaataaaaacaagattccttttttactattgtctggatctcccattactaacacacctaatactctgggtcatattatagatttaatgtccgaagagacgatagattttggtgaaattattagtcgtggtaagaaagtaattcagacacttcttaacgaacgcggtgtgaatgtacttaaggatttgcttaaaggaagaatatcatattacgaaatgcctgataaagatctaccaacgataagatatcacggacgtaagtttctagatactagagtagtatattgtcacatgtctaaacttcaagagagagattatatgattactagacgacagctatgttatcatgaaatgtttgataaaaatatgtataacgtgtcaatggcagtattgggacaacttaatctgatgaataatttagatactttatttcaggaacaggataaggaattgtacccaaatctgaaaataaataatggcgtgttatacggagaagaattggtaacgttaaacattagttccaaatttaaatactttattaatcggatacagacactcaacggaaaacattttatatacttttctaattctacatatggcggattggtaattaaatatatcatgctcagtaatggatattctgaatataatggttctcagggaactaatccacatatgataaacggcaaaccaaaaacatttgctatcgttactagtaaaatgaaatcgtctttagaggatctattagatgtgtataattctcctgaaaacgatgatggtagtcaattgatgtttttgttttcatcaaacattatgtccgaatcctatactctaaaagaggtaaggcatatttggtttatgactatcccagatactttttctcaatacaaccaaattcttggacgatctattagaaaattctcttacgccgatatttctgaaccagttaatgtatatcttttagccgccgtatattccgatttcaatgacgaagtgacgtcattaaacgattacacacaggatgaattaattaatgttttaccatttgacatcaaaaagctgttgtatctaaaatttaagacgaaagaaacgaatagaatatactctattcttcaagagatgtctgaaacgtattctcttccaccacatccatcaattgtaaaagttttattgggagaattggtcagacaatttttttataataattctcgtattaagtataacgataccaagttacttaaaatggttacatcagttataaaaaataaagaagacgctaggaattacatagatgatattgtaaacggtcacttctttgtatcgaataaagtatttgataaatctcttttatacaaatacgaaaacgatattattacagtaccgtttagactttcctacgaaccatttgtttggggagttaactttcgtaaagaatataacgtggtatcttctccataaaactgatgagatatataaagaaataaatgtcgagctttgttaccaatggatacctttccgttacattggaaccacacgagctgacgttagacataaaaactaatattaggaatgccgtatataagacgtatctccatagagaaattagtggtaaaatggccaagaaaatagaaattcgtgaagacgtggaattacctctcggcgaaatagttaataattctgtagttataaacgttccgtgtgtaataacctacgcgtattatcacgttggggatatagtcagaggaacattaaacatcgaagatgaatcaaatgtaactattcaatgtggagatttaatctgtaaactaagtagagattcgggtactgtatcatttagcgattcaaagtactgcttttttcgaaatggtaatgcgtatgacaatggcagcgaagtcactgccgttctaatggaggctcaacaaggtatcgaatctagttttgtttttctcgcgaatatcgtcgactcataaaaaagagaatagcggtaagtataaacacgaatactatggcaataattgcgaatgttttattctcttcgatatatttttgataatatgaaaaacatgtctctctcaaatcggacaaccatctcataaaatagttctcgcgcgctggagaggtagttgccgctcgtataatctctccagaataatatacttgcgtgtcgtcgttcaatttatacggatttctatagttctctgttatataatgcggtttgccctcatgattagacgacgacaatagtgttctaaatttagatagttgatcagaatgaatgtttattggcgttggaaaaattatccatacagcgtctgcagagtggttgatagttgttcctagatatgtaaaataatccaacttactaggcagcaaattgtctagataaaatactgaatcaaacggtgcagacgtattggcggatctaatggaatccaattgattaactatcttttgaaaatatacatttttatgatccaatacttgtaagaatatagaaataatgataagtccatcatcgtgtttttttgcctcttcataagaactatattttttcttattccaatgaacaagattaatctctccagagtatttgtacacatctatcaagtgattggatccataatcgtcttcctttccccaatatatatgtagtgatgataacacatattcattggggagaaaccctccacttatatatcctcctttaaaattaatccttactagttttccagtgttctggatagtggttggtttcgactcattataatgtatgtctaacggcttcaatcgcgcgttagaaattgcttttttagtttctatattaataggagatagttgttgcggcatagtaaaaatgaaatgataactgtttaaaaatagctcttagtatgggaattacaatggatgaggaagtgatatttgaaactcctagagaattaatatctattaaacgaataaaagatattccaagatcaaaagacacgcatgtgtttgctgcgtgtataacaagtgacggatatccgttaataggagctagaagaacttcattcgcgttccaggcgatattatctcaacaaaattcagattctatctttagagtatccactaaactattacggtttatgtactacaatgaactaagagaaatctttagacggttgagaaaaggttctatcaacaatatcgatcctcactttgaagagttaatattattgggtggtaaactagataaaaaggaatctattaaagattgtttaagaagagaattaaaagaggaaagtgatgaacgtataacagtaaaagaatttggaaatgtaattctaaaacttacaacacgggataaattatttaataaagtatatataagttattgcatggcgtgttttattaatcaatcgttggaggatttatcgcatactagtatttacaatgtagaaattagaaagattaaatcattaaatgattgtattaacgacgataaatacgaatatctgtcttatatttataatatgctagttaatagtaaatgaacttttacagatctagtataattagtcagattattaagtataatagacgactagctaagtctattatttgcgaggatgactctcaaattattacactcacggcattcgttaaccaatgcctatggtgtcataaacgagtatccgtgtccgctattttattaactactgataacaaaatattagtatgtaacagacgagatagttttctctattctgaaataattagaactagaaacatgtttagaaagaaacgattatttctgaattattccaattatttgaacaaacaggaaagaagtatactatcgtcatttttttctctagatccagctactactgataatgatagaatagacgctatttatccgggtggcatacccaaaaggggtgagaatgttccagagtgtttatccagggaaattaaagaagaagttaatatagacaattcttttgtattcatagacactcggttttttattcatggcatcatagaagataccattattaataaattttttgaggtaatcttctttgtcggaagaatatctctaacgagtgatcaaatcattgatacatttaaaagtaatcatgaaatcaaggatctaatatttttagatccgaattcaggtaatggactccaatacgaaattgcaaaatatgctctagatactgcaaaacttaaatgttacggccatagaggatgttattatgaatcattaaaaaaattaactgaggatgattgattaaaaaatataaattaatttaccatcgtgtatttttataacgggattgtccggcatatcatgtagatagttaccgtctacatcgtatactcgaccatctacgcctttaaatcctctatttattgacattaatctattagaattggaataccaaatattagtaccctcaattagtttattggtaatattttttttagacgatagatcgatggctcttgaaaccaaggttttccaaccggactcattgtcgatcggtgagaagtctttttcattagcatgaatccattctaatgatgtatgtttaaacactctaaacaattggacaaattcttttgatttgctttgaatgatttcaaataggtcttcgtctacagtaggcataccattagataatctagccattataaagtgcacgtttacatatctacgttctggaggagtaagaacgtgactattgagacgaatggctcttcctactatctgacgaagagacgcctcgttccatgtcatatctaaaatgaagatatcattaattgagaaaaaactaataccctcgcctccactagaagagaatacgcatgttttaatgcattctccgttagtgtttgattcttggttaaactcagccaccgccttgattctagtatcttttgttctagatgagaactctatattagagataccaaagactttgaaatatagtaataagatttctattcctgactgattaacaaatggttcaaagactagacatttaccatgggatgctaatattcccaaacatacatctataaatttgacgcttttctcttttaattcagtaaatagagagatatcagccgcactagcatcccctttcaatagttctccctttttaaaggtatctaatgcggatttagaaaactctctatctcttaatgaatttttaaaatcattatatagtgttgctatctcttgcgcgtattcgcccggatcacgattttgtctttcaggaaagctatcgaacgtaaacgtagtagccatacgtctcagaattctaaatgatgatatacctgtttttatttcagcgagtttagccttttgataaatttcttcttgctttttcgacatattaacgtatcgcattaatactgttttcttagcgaatgatgcagacccttctacgtcatcaaaaatagaaaactcgttattaactatatacgaacatagtcctcctagtttggagactaattctttttcatcgactagacgtttattctcaaatagtgattggtgttgtaaggatcctggtcgtagtaagttaaccaacatggtgaattcttgcacactattgacgataggtgtagccgataaacaaatcatcttatggttttttaacgcaatggtcttagataaaaaattatatactgaacgagtaggacggatcttaccatcttctttgattaatgatttagaaatgaagttatgacattcatcaatgatgacgcatattctactcttggaattaatagttttgatattagtaaaaaatttatttctaaaattttgatcatcgtaattaataaaaatacaatccttcgttatctctggagcgtatctgagtatagtgttcatccaaggatcttctatcaaagcctttttcaccaataagataatagcccaattcgtataaatatccttaagatgtttgagaatatatacagtagtcattgttttaccgacacccgtttcatggaacaataaaagagaatgcatactgtctaatcctaagaaaactcttgctacaaaatgttgataatccttgaggcgtactacgtccgaccccatcatttcaacgggcatattagtagttctgcgtaaggcataatcgatataggccgcgtgtgatttactcatttatgagtgataagtaataactatgttttaaaaatcacagcagtagtttaactagtcttctctgatgtttgttttcgatactttttgaatcagaagtcatactagaataaagcaacgagtgaacgtaatagagagcttcgtatactctattcgaaaactctaagaacttattaatgaattccgtatccactggattgtttaaaatactaaattgaacactgttcacatccttccaagaagaagacttagtgacggacttaacatgagacataaataaatccaaattttttttacaaacatcactagccaccataatggcgctatctttcaaccagctatcgcttacgcattttagcagtctaacatttttaaagagactacaatatattctcatagtatcgattacacctctaccgaataaagttggaagtttaataatacaatatttttcgtttacaaaatcaaataatggtcgaaacacgtcgaaggttaacatcttataatcgctaatgtatagattgttttcagtgagatgattattagatttaatagcatctcgttcacgtttgaacagtttattgcgtgcgctgaggtcggcaactacggcgtccgctttagtactcctcccataatactttacgctattaatctttaaaatttcatagactttatctagatcgctttctggtaacatgatatcatgtgtaaaaagttttaacatgtcggtcggcattctatttagatcattaactctagaaatctgaagaaagtaattagctccgtattccagactaggtaatgggcttttacctagagacagattaagttctggcaatgtttcataaaatggaagaaggacatgcgttccctcccggatattttttacaatttcatccatttacaactctatagtttgttttcattattattagttattatctcccataatcttggtaatacttaccccttgatcgtaagataccttatacaggtcattacatacaactaccaattgtttttgtacataatagattggatggttgacatccatggtggaataaactactcgaacagatagtttatctttccccctagatacattagccgtaatagttgtcggcctaaagaatatctttggtgtaaagttaaaagttagggttcttgttccattattgctttttgtcagtagttcattataaattctcgagatgggtccgttctctgaatatagaacatcatttccaaatctaacttctagtctagaaataatatcggtcttattcttaaaatctattcccttgatgaagggatcgttaatgaacaaatccttggcctttgattcggctgatctattatctccgttatagacgttacgttgactagtccaaagacttacaggaatagatgtatcgatgatgttgatactatgtgatatgtgagcaaagattgttctcttagtggcatcactatatgttccagtaatggcggaaaactttttagaaatgttatatataaaagaattttttcgtgttccaaacattagcagattagtatgaagataaacactcatattatcaggaacattatcaatttttacatacacatcagcatcttgaatagaaacgataccatcttctggaacctctacgatctcggcagactccggataaccagtcggtggaccatcgctaacaataactagatcatccaacaatctactcacatatgcatctatataatctttttcatcttgtgagtaccctggatacgaaataaatttattatccgtatttccataataaggtttagtataaacagagagcgatgttgccgcatgaacttcagttacagtcgccgttggttggtttatttgacctattactctcctaggtttctctataaacgatggtttaatttgtacattcttaaccatatatccaataaagctcaattcaggaacataaacaaattctttgttgaacgtttcaaagtcgaacgaagagtcacgaataacgatatcggatactggattgaaggtcaccgttacggtaatttttgaatcggatagtttaagactgctgaatgtatcttccacatcaaacggagttttaatataaacgtatactgtagatggttctttaatagtgtcattaggagttaggccaatagaaatatcattaagttcactagaatatccagagtgtttcaaagcaattgtattattgatacaattattatataattcttcgccctcaatttcccaaataacaccgttacacgaagagatagatacgtgattaatacatttatatccaacatatggtacgtaactgaatcttcccatacctttaacttctggaagttccaaactcagaaccaaatgattaagcgcagtaatatactgatccctaatttcgaagctagcgatagcctgattgtctggaccatcgtttgtcataactccggatagagaaatatattgcggcatatataaagttggaatttgactatcgactgcgaagacattagaccgtttaatagagtcatccccaccgatcaaagaattaatgatagtattattcattttctatttaaaatggaaaaagcttacaataaactccgtagagaaatatctataatttgtgagttttccttaaagtaacagcttccgtaaacgccgtctttatctcttagtaggtttattgtatttatgaccttttccttatcttcatagaatactaaaggcaacaaagaaatttttggttcttctctaagagctacgtgagacttaaccatagaagccaacgaatccctacatattttagaacagaaatacccaacttcaccacccttgtatgtctcaatactaataggtctaaaaaccaaatcttgattacaaaaccaacacttatcaattacactatttgtcttaatagacacatctgccatagatttataatactttggtagtatacaagcgagtgcttcttctttagcgggcttaaagactgctttaggtgctgaaataaccacatctggaaggcttactcgcttagccatttaattacggaactatttttttatacttctaatgagcaagtagaaaacctctcatctacaaaaacgtactcgtgtccataatcctctaccatagttacacgttttttagatctcatatgtgctaaaaagttttcccatactaattggttactattatttttcgtataatttttaacagtttgaggttttagatttttagttacagaagtgatatcgaatattttatccaaaaagaatgaataattaattgtcttagaaggagtgttttcttggcaaaagaataccaagtgcttaaatatttctactacttcattaatcttttctgtactcagattcagtttctcatcttttacttgattgattatttcaaagactaacttataatcctttttatttattctctcgttagccttaagaaaactagatacaaaatttgcatctacatcatccgtggatatttgatttttttccatgatatccaagagttccgagataatttctccagaacattgatgagacaataatctccgcaatacatttctcaaatgaataagtttattagacacgtggaagtttgactttttttgtacctttgtacatttttgaaataccgactcgcaaaaaatacaatattcatatccttgttcagatactataccgttatgtctacaaccgctacataatcgtagattcatgttaacactctacgtatctcgtcgtccaatattttatataaaaacattttatttctagacgttgccagaaaatcctgtaatatttttagttttttgggctgtgaataaagtatcgccctaatattgttaccgtcttccgccaatatagtagttaaattatccgcacatgcagaagaacaccgcttaggcggattcagtacaatgttatatttttcgtaccaactcatttaaatatcataatctaaaatagttctgtaatatgtctagcgctaatatattgatcataatcctgtgcataaattaagatacaacaatgtctcgaaatcatcgacatggcttcttccatagttagaagatcgtcgtcaaagttagcaacgtgattcatcaacatttgctgttttgaggcagcaaatactgaaccgtcgccattcaaccattcataaaaaccatcgtctgaatccattgataatttcttgtactggtttttgagagctcgcatcaatctagcatttctagctcccggattgaaaacagaaagaggatcgtacatccagggtccattttctgtaaatagaatcgtataatgtcccttcaagaagatatcagacgatccacaatcaaagaattggtctccgagtttgtaacaaactgcggactttaacctatacatgataccgtttagcataatttctggtgatacgtcaatcggagtatcatctattagagatctaaagccggtgtaacattctccaccaaacatattcttattctgacgtcgttctacataaaacatcattgctccattaacgataacaggggaatgaacagcactacccatcacattagttcccaatggatcaatgtgtgtaactccagaacatcttccatagcctatgttaggaggagcgaacaccactcttccactattgccatcgaatgccatagaataaatatccttggaattgatagaaatcggactgtcggatgttgtgatcatcttcataggattaacaactatgtatggtgccgcctgaagtttcatatcgtaactgatgccgtttataggtctagccacagaaaccaacgtaggtctaaatccaactatagacaaaatagaagccaatatctgttcctcatctgtcataacttgagagcatccagtatgaataatcttcattagatggggatctaccgcatcatcatcgttacaataaaaaattcccattctaatgttcataattgcttttctaatcatggtatgcatgtttgctctctgaatctctgtggaaattagatctgatacacctgtaatcactatcggattatcctccgtaagacgattaaccaacaacatataattataagactttacttttctaaattcataaagttgctggattaggctataggtgtctccatgtacatacgcgttctcgagcgcaggaagtttaataccgaatagtgccatcagaataggatgaatatagtaattagtttctggttttctataaataaaagacaaatcttgtgaactagacatatcggtaaaatgcatggattggaatcgtgtagtcgacagaagaatatgatgattagatggagagtatattttatctaactctttgagttggtcaccgattctaggactagctcgagaatgaataagtactaaaggatgagtacatttcacagaaacactagcattgttcaatgtgctctttacatgggtaaggagttgaaatagctcgtttctatttgttctgacaatatttagtttattcataatgttaagcatatcctgaatagtaaagttagatgtgtcatacttgttagtagttagatatttagcaattgcattcccatcatttctcaatctcgtactccaatcatgtgtagatgctacttcgtcgatggaaaccatacaatcctttttgataggctgttgagattgatcatttcctgcacgtttaggtttggtacgttgatttctagcccctgcggatataaagtcatcgtctacaatttgggacaatgaattgcatacactacaagacaaagatttatcagaagtgtgaatatgatcttcatctaccaaagaaagagtttgattagtataactagattttagtcctgcgttagatgttaaaaaaacatcgctattgaccacggcttccattatttatattcgtagtttttactcgaaagcgtgattttaatatccaatcttattacttttggaatcgttcaaaacctttgactagttgtagaatttgatctattgccctacgcgtatactcccttgcatcatatacgttcgtcaccagatcgtttgtttcggcctgaagttggtgcatatctctttcaacattcgacatgagatccttaagggccatatcgtctagattttgttgagatgctgctcctggatttggattttgttgtgctgttgtacatactgtaccaccagtaggtgtaggagtacatacagtggccacaataggaggttgagaaagtgtaaccgttggagtagtacaagaaatacttccatccgattgttgtgtacatgtagttgttggtaacgtctgagaaggttgggtagatggcggcgtcgtcgttttttgatctttattaaatttagagataatatcctgaacagcattgctcggcgtcaacgctggaaggagtgaactcgccggcgcatcagtatcttcagacagccaatcaaaaagattagacatatcagatgatgtattagtttgttgtcgtggttttggtgtaggagcagtactactaggtagaagaataggagccgatgtagctgttggaaccggctgtggagttatatgaatagttggttgtagcggttggataggctgtctgctggcggccatcatattatctctagctagttgttctcgcaactgtctttgataatacgactcttgagactttagtcctatttcaatcgcttcatcctttttcgtatccggatccttttcttcagaataatagattgacgactttggtgtagaggattctgccagcctctgtgagaacttgttaaagaagtccatttaaggctttaaaattgaattgcgattataagattaaatggcagacacagacgatattatcgactatgaatccgatgatctcaccgaatacgaggatgatgaagaagaggaagaagatggagagtcactagaaactagtgatatagatcccaaatcttcttataagattgtagaatcagcatccactcatatagaagatgcgcattccaatcttaaacatatagggaatcatatatctgctcttaaacgacgctatactagacgtataagtctatttgaaatagcgggtataatagcagaaagctataacttgcttcaacgaggaagattacctctagtttcagaattttctgacgaaacgatgaagcaaaatatgctacatgtaattatacaagagatagaggagggttcttgtcctatagtcatcgaaaagaacggagaattgttgtcggtaaacgattttgacaaagatggtctaaaattccatctagactatattatcaaaatttggaaacttcaaaaacgatattagaatttatacgaatatcgttctctaaatgtcacaatcaagtctcgcatgttcagcaatttattgtcgtactttatatcgtgttcattaacgatatcttgcaaaatagtaatgattctatcttccttcgatagatattcttcagagattattgtcttatattctttcttgttatcagatatgaatttgataagactttgaacattattgatacccgtctgtttaattttttctacagatattttagttttggcagattctatcgtatctgtcaatagacatccaacatcgacattcgacgtcaattgtctataaatcaacgtataaattttagaaataacattagcgaattgttgtgcgttgatgtcgttattctgaaacagtatgattttaggtagcattttcttaacaaagagaacgtatttattgttactcagttgaacagatgatatatccagattactaacgcatctgattccgtataccaaactttcagaagaaatggtatacaattgtttgtattcattcaatgtctctttttcagaaattagtttagagtcgaatactgcaataattttcaagagatagttttcatcagataagattttatttagtgtagatatgataaaactattgttttgttggagaacttgatacgccgcgttctctgtagtcgacgctctcaaatgggaaacaatctccattatttttttggaatcggatactatatcttcggtatcttgacgcagtctagtatacatagagttaagagagattagagtttgtacattaagcaacatgtctctaaatgtggctacaaacttttcctttttcacatcatctagtttattatataccgatttcacaacggcaccagatttaaggaaccagaatgaaaaactctgataactacaatatttcatcatagttacgattttatcatcttctatagttggtgtaatagcgcatacctttttctccaagactggaaccaacgtcataaaaatgtttaaatcaaaatccatatcaacatctgatgcgctaagaccagtctcgcgttcaagattatctttactaatggtgacgaactcatcgtataaaactctaagtttgtccattatttatttacagatttagttgtttaatttatttgtgctcttccagagttgggatagtatttttctaacgtcggtattatattattaggatctacgttcatatgtatcataatattaatcatccacgttttgataaatctatctttagcttctgaaataacgtatttaaacaaaggagaaaaatatttagctacggcatcagacgcaataacattttttgtaaatgtaacgtatttagacgacagatcttcgttaaaaagttttccatctatgtagaatccatcggttgttaacaccattcccgcgtcagattgaataggagtttgaatagtttgttttggaaatagatccttcaataacttatagttgggtgggaaaaaatcgattttatcactagactctttcttttttactatcattacctcatgaactatttcttgaatgagtatatgtattttctttcctatatcggacgcgttcattggaaaatataccatgtcgttaactataagaatatttttatcctcgtttacaaactgaataatatcagatgtagttcgtaaacgaactatatcatcaccagcacaacatctaactatatgatatccactagtttcctttagccgtttattatcttgttccatattagcagtcattccatcatttaagaaggcgtcaaagataatagggagaaatgacattttggattctgttacgactttaccaaaattaaggatatacggacttactatctttttctcaacgtcaatttgatgaacacacgatgaaaatgtgcttctatgagattgatcatgtagaaaacaacaagggatacaatatttccgcatatcatgaaatatattaagaaatcccaccttattatatttccccaaaggatccatgcacgtaaacattatgccgttatcattaataaagacttctttctcatcggatctgtaaaagttgttactgatttttttcattccaggatctagataattaataatgatgggttttctattcttattctttgtattttggcatatcctagaccagtaaacagtttccactttggtaaaatcagcagacttttgaacgctattaaacatggcattaatggcaataactaaaaatgtaaaatatttttctatgttaggaatatggtttttcactttaatagatatatggtttttggccaaaatgatagatatttttttatccgaggatagtaaaatattattagtcgccgtctctataaaaatgaagctagtctcgatatccaattttattctagaattgataggagtcgccaaatgtaccttatacgttatatctcccttgatgcgttccatttgtgtatctatatcggacacaagatctgtaaatagttttacgttattaatcatcacggtatcgccgtcgctagataacgctaatgtaccatccaagtcccaaatggagagatttaactgttcatcgtttagaataaaatgattaccggtcatattaataaagtgttcatcgtatctagataacaacgacttataattaatgtccaagtcttgaactcgctgaatgatcttttttaacccagttagttttagattggtacgaaatatattgttaaactttgattctacagtaatgtccaaatctagttgtggaaatacttccatcaacattgtttcaaacttgataatattattatctacatcttcgtacgatccaaattccggaatagatgtatcgcacgctctggccacccagataaccaaaaagtcacacgctccaggatatacattgtataaaaagctatcgttttttagtagggtttttttctgcgtgtatacgaagggattaaaaatagtattatcaacgtaactatattccaaattattcttatgagaatagataataatatcgtccttaatatctaacaaatttcctaaatatccctttaattgagtcattcgaagcgtcaatagaatatgtctcttaactatttccggctgttgtatatttaaatgacttcgtaaaaaataatatatgggcgacttctcatctatgtaatcatatggagtgagatatagggctcgttctacctcctgccccttacccacctgtaataccaattgcggacttactatatatcgcatatttatatcgtggggtaaagtgaaaatctactaccgatgatgtaagtcttacaatgttcgaaccagtaccagatcttaatttggaggcctccgtagaactaggggaggtaaatatagatcaaacaacacctatgataaaggagaatagcggttttatatcccgcagtagacgtctattcgcccatagatctaaggatgatgagagaaaactagcactacgattctttttacaaagactttattttttagatcatagagagattcattatttgttcagatgcgttgacgctgtaaaagacgtcactattaccaaaaaaaataacattatcgtggcgccttatatagcacttttaactatcgcatcaaaaggatgcaaacttacagaaacaatgattgaagcattctttccagaactatataatgaacatagtaagaaatttaaattcaactctcaagtatccatcatccaagaaaaactcggataccagtttggaaactatcacgtttatgattttgaaccgtattactctacagtagctctggctattcgagatgaacattcatctggcatttttaatatccgtcaagagagttatctggtaagttcattatctgaaataacatatagattttatctaattaatctaaaatctgatcttgttcaatggagtgctagtacgggcgctgtaattaatcaaatggtaaatactgtattgattacagtgtatgaaaagttacaactggtcatagaaaatgattcacaatttacatgttcattggctgtggaatcaaaacttccaataaaattacttaaagatagaaatgaattatttacaaaattcattaacgagttaaaaaagaccagttcattcaagataagcaaacgcgataaggatacgctactaaaatattttacttaggactggagttagaatttatagacgactcatttcgtttatcattgttactattattactattactatcattattagtgttggcattattagtattcttcttgtcatcttgttcagaaatatacagcaatgctatacctaatactaaatacattatcatgctcgcaatggctctaacaacaacgaaccaaaatgaatttggtcgtagcttttgttcacaaaaatacataaagaaatgtctacataaatctatggcgccattggctacttgaaatagcgccagtcctcctacagattttaatatagctgtataacatgacatttattcatcatcaaaagagacagagtcaccatctgtcatatttagattttttttcatgtgttcaaagtatcctctactcatttcattataatagtttatcatacttagaattttaggacggatcaatgagtaagacttgactagatcgtcagtagtaatttgtgcatcgtctattctgcatccgcttcgtcgaataatgtatagcatcgctttgagattctccatagctatcaagtctttatacaatgacatggaaatatctgtgaatactttatacttctccaacatcgatgccttaacatcatcgcctactttagcattgaaaatacgttctattgtgtagatggatgtagcaagatttttaaacaacaatgccatcttacacgatgattgcctcaagtctccaatcgtttgtttagaacgattagctacagagtccaatgcttggctgactagcatattattatctttagaaattgtattcttcaatgaggcgtttatcatatctgtgatttcgttagtcatattacagtctgactgggttgtaatgttatccaacatatcacctatggatacggtacacgtaccagcatttgtaataatcctatctaagatgttgtatggcattgcgcagaaaatatcttctcctgtaatatctccactctcgataaatctactcagattattcttaaatgccttattctctggagaaaagatatcagtgtccatcatttcattaatagtatacgcagaaaagataccacgagtatcaattctatccaagatacttatcggttccgagtcacagataatggtttcctctccttcgggagatcctgcatagaaatatctaggacaatagtttctatactgtctgtaactctgataatctctaaagtcactaactgataccatgaaattgagaagatcaaacgctgaagtaattaatttttctgcctcgtttttactacaactagttttcatcaatgtagtgacgatgtattgtttagttacttttggtctaatactgatgatagagatattattgcttcccataatggatcttctagtagtcaccttaaagcccattgatgcgaatagcagatagataaagtcttggtatgactcctttctaatatagtacggactacctttgtcacccaactttatacccacataagccataacaacctctttaatagccgtttcatgaggtttatcagccatgagcctgagtagttggaagaatctcatgaatcccgtctcagaaagtcctatatgcatgatagatttatctttcctgggaaactctcgtatagtcatagatgaaatactctttaaagtttctgaaataagattagtaacagtcttacctccgactactctaggtaacaaacaaactctaataggtgttttctctgcggagataatatcagaaaggatagagcaataagtagtattattgtgattataaagaccgaatacataacaggtagaatttataaacatcatgtcctgaaggtttttagacttgtattcctcgtaatccataccgtcccaaaacatggatttggtaactttgatagccgtagatctttgttccttcgccaacaggttaaagaaattaataaagaatttgttgtttctatttatgtccacaaattgcacgtttggaagcgccacggttacattcactgcagcattttgaggatcgcgagtatgaagtacgatgttattgtttactggtatatctggaaagaaatctaccagtctaggaataagagattgatatcgcatagaaatagtaaagtttataatctcatcatcgaagagcattttgttaccattgtaataaatatccactctgtcatatgtataaatgaagtactgttcaaacatgatgagatgtttatatgttggcatagtagtgagatcgacgtttggtaatggcaatgtattaagattaactccataatgtctagcagcatctgcgatgttataagcgtcgtcaaagcggggtcgatcttgtattgttatatattgtctaacacctataagattatcaaaatcttgtctgcttaatacaccgttaacaatttttgccttgaattcttttattggtgcattaataacatccttatagaggatgttaaacaaataagtgttatcaaagttaagatctggatatttcttttctgctagaacatccattgagtcggagccatctggtttaatataaccaccgataaatctagctctgtattctgtatccgtcaatctaatattaagaaggtgttgagtgaaaggtggaagatcgtaaaagctgtgagtattaatgataggattagtttccgaactaatgttaattggggtattaataatatctatatttccagcgttaagtgtaacattaaacagttttaattcacgtgacgtggtatcaattaaataattaatgcccaatttggatatagcagcctgaagctcatcttgtttagttacggatcctaatgagttattaagcaatatatcgaacggatgaacgaaggttgttttaagttggtcacatactttgtaatctagacatagatgcggaagaacggtagaaactatacgaaataaatattcagagtcctctaattgatcaagagtaactattgacttaataggcatcatttatttagtattaaatgacgaccgtaccagtgacggatatacaaaacgatttaattacagagttttcagaagataattatccatctaacaaaaattatgaaataactcttcgtcaaatgtctattctaactcacgttaacaacgtggtagatagagaacataatgccgccgtagtgtcatctccagaggaaatatcctcacaacttaatgaagatctatttccagatgatgattcaccggccactattatcgaacgagtacaacctcatactactattattgacgatactccacctcctacgtttcgtagagagttattaatatcggaacaacgtcaacaacgagaaaaaagatttaatattacagtatcgaaaaatgctgaagcaataatggaatctagatctatgataacttctatgccaacacaaacaccatccttgggagtagtttatgataaagataaaagaattcagatgttagaggatgaagtggttaatcttagaaatcaacgatctaatacaaaatcatctgataatttagataattttaccaaaatactatttggtaagactccgtataaatcaacagaagttaataagcgtatagccatcgttaattatgcaaatttgaacgggtctcccttatcagtcgaggacttggatgtttgttcggaggatgaaatagatagaatctataaaacgattaaacaatatcacgaaagtagaaaacgaaaaattatcgtcactaacgtgattattattgtcataaacattatcgagcaggcattgctaaaactcggatttgaagaaatcaaaggactgagtaccgatatcacttcagaaattatcgatgtggagatcggagatgactgcgatgctgtagcatcaaaactaggaatcggtaacagtccggttcttaatattgtattgtttatactcaagatattcgttaaacgaattaaaattatttaatttaatacattcccatatccagacaacaatcgtctggattaatctgttcctgtcgtctcataccggacgacatattaatctttttattagtgggcatctttttagatggtttctttttcccagcattaactgagtcgatacctagaagatcgtgattgatctctccgaccattccacgaacttctaattggccgtctctgacggtaccataaactattttaccagcattagtaacagcttggacaatctgaccatccatcgcattgtacgatgtagtagtaactgttgttctacgtctaggagcaccagaagtatttttggagcccttggatgttgatgtagaagaagacgaggattttgattttggtttacatgtaatacattttgaactctttgattttgtatcacatgcgccggcagtcacatctgtttgagaattaagattattgttgcctcctttgacggctgcatctccaccgatttgcgctagtagatttttaagctgtggtgtaatcttattaactgtttcgatataatcatcgtaactgcttctaacggctaaattttttttatccgccatttagaagctaaaaatatttttatttatgcagaagatttaactagattatacaatgaactaatatgatccttttccagattatttacaaacttggtattttttggttctggaggaggcgaatttaaattcggacttggattcggattttgtaagttcttgatcttattatacatcgagtataggatggcgacagtaactgctacacaaataccgatcaaaagaagaataccaatcatttattgacaataacttcactattgatcaagtatgcaatatatcatcttttcactaaataagtagtaataatgattcaacaatgtcgagatatatggacgataataatttagttcatggaaatatcgctatgattggtgtgaatgactccgctaactctgtggggtgcgcagtgctttccccacatagaataaattagcattccgactgtgataataataccaagtataaacgccataatactcaatactttccatgtacgagtgggactggtagacttactaaagtcaataaaggcgaagatacacgaaagaatcaaaagaatgattccagcgattagcacgccggaaaaataatttccaatcataagcatcatgtccatttaactaataaaaattttaaatcgccgaatgaacaaagtggaatataaaccatataaaaacaatagtttgtactgcaaaaataatatctatttttgttttcgaagatatggtaaaattaaatagtagtacacagcatgttataactaacagcagcaacggctcgtaattacttatcatttactagacgaaaaggtggtgggatattttcttgctcaaataatacgaatatatcacccatccattttatgcgatgtttatatactctaatctttaatagatctatagacgacgggtttaccaacaatatagattttatcgattcatctaatttaaacccttccttaaacgtgaatgatctattatctggcataacgatgaccctacctgatgaatcggacaatgtactgggccatgtagaataaattatcaacgaattatcgtctacgaacatttatatcatttgttttaattttaggacgcgaataaatggatataaaatagaaaataacagatattacaaccaatgttatggccgcgcccaaccaggtaggcagttttattttatcttttactacaggttctcctggatgtacgtcaccaacggcggacgtagttctagtacaattagacgtaagttccgcttgggaattttttaacgctaaagagttaacgttaatcgtgcacccaacgtatttacatctagttcgttgaacatcttgattataatataaccattttctatctctagattcgtcagtgcactcatgtaaccaacataccctaggtcctaaatatttatctccggaattagattttggataattcgcgcaccaacaatttctatttcctttatgatcgttacaaaagacgtataatgccgtatccccaaaagtaaaataatcaggacgaataattctaataaactcagaacaatatctcgcatccatatgtttggagcaaatatcggaataagtagacatagccggtttccgttttgcacgtaaccattctaaacaattggggtttccaggatcgtttctacaaaatccagtcatgaaatcgtcacaatgttctgtcttgtaattattattaaatatttttggacagtgtttggtatttgtcttagaacaacattttgccacgctatcactatcgcccaggagataatccttttttataaaatgacatcgttgcccggatgctatataatcagtagcgtgttttaaatccttaatatattcaggagttacctcgttctgataatagattaatgatccaggacgaaatttgaaagaactacatggttctccatgaattaatacatattgtttagcaaattcaggaactataaaactactacaatgatctatcgacataccatctatcaaacaaaacttgggtttaatttctcccggagatgtttcataatagtacgtataactttcttctgcaaacttaacagctctattatattcaggataattaaaacctaattccatatatttgtctcgtatatctgctattcctggtgctattttgattctattaagagtaacagctgcccccattcttaataatcgtcagtatttaaactgttaaatgttggtatatcaacatctaccttatttcccgcagtataaggtttgttgcaggtatactgttcaggaatggttacatttatacttcttctatagtcctgtctttcgatgttcatcacatatgcaaagaacagaataaacaaaataatgtaagaaataatattaaatatctgtgaattcgtaaatacattgattgccataataattacagcagctacaatacacacaatagacattcccacagtgttgccattacctccacgatacatttgagttactaagcaataggtaataactaagctagtaagaggcaatagaaaagatgagataaatatcatcaatatagagattagaggagggctatatagagccaagacgaacaaaatcaaaccgagtaacgttctaacatcattatttttgaagattcccaaataatcattcattcctccataatcgttttgcatcatacctccatctttaggcataaacgattgctgctgttcctctgtaaataaatctttatcaagcactccagcacccgcagagaagtcgtcaagcatattgtaatatcttaaataactcatttatatattaaaaaatgtcactattaaagatggagtataatctttatgccgaactaaaaaaaatgacttgtggtcaacccctaagtctttttaacgaagacggggatttcgtagaagttgaaccgggatcatcctttaagtttctgatacctaagggattttacgcctctccttccgtaaagacgagtctagtattcgagacattaacaacgaccgataataaaatcactagtatcaatccaacaaatgcgccaaagttatatcctcttcaacgcaaagtcgtatctgaagtagtttctaatatgaggaaaatgatcgaatcaaaacgtcctctatacattactcttcacttggcgtgtggatttggtaagactattaccacgtgttatcttatggctacacacggtagaaaaaccgtcatttgcgtacccaataaaatgttaatacatcaatggaagacacaggtagaggcagtcggattggaacataagatatccatagatggagtaagtagtctattaaaggaactaaagactcaaagtccggatgtattaatagtagtcagtagacatctgacaaacgatgccttttgtaaatatatcaataagcattatgatttgttcatcttggatgaatcacatacgtataatctgatgaacaatacagcagttacaagatttttagcgtattatcctccgatgatgtgttattttttaactgctacacctagaccatctaaccgaatttattgtaacagtattattaatattgccaagttatccaatctaaaaaaaactatctatgcagtagatagtttttttgagccatattccacagataatattagacatatggtaaaacgactagatggaccatctaataaatatcatatatataccgagaagttattatctgtagacgagcctagaaatcaacttattcttgataccctggtagaagaattcaagtcaggaactattaatcgcattttagttattactaaactacgtgaacatatggtattattctacaaacgattattagattttttcggaccagaggttgtatttataggagacgcccaaaatagacgtactccagatatggtcaaatcaatcaaggaactaaatagatttatattcgtatccaccttattttattccggtactggtttagatattcctagtttggattcgttgttcatttgctcggcagtaatcaacaatatgcaaatagagcaattactagggagggtatgtcgagaaacagaactattagataggacggtatatgtatttcctaacacatccatcaaagaaataaagtacatgataggaaatttcatgcaacgaattattagtctgtctgtagataaactaggatttaaacaaaaaagttatcggaaacatcaagaatccgatcccacttctgcatgtacaacatcatccagagaagaacgtgtattaaatagaatatttaactcgcaaaatcgttaagaagtttaagcgacgatccgcatgctgcgcaggccagtgtattacccctcatagtattaatataatccaatgatacttttgtgatgtcggaaatcttaaccaatttagactgacaggcagaacacgtcatgcaatcatcatcgtcatcgataactgtagtcttgggcttctttttgcgactcttcattccggaacgcacattggtgctatccatttaggtagtaaaaaataagtcagaatatgccctataacacgatcgtgcaaaacctggtatatcgtctctatctttatcacaatatagtgtatcgacatttttattattattgacctcgtttatcttggaacatggaatgggaacatttttgttatcaacggccatctttgccttaattccagatgttgtaaaattataactaaacagtctatcatcgacacaaatgaaattcttgtttagacgtttgtagtttacgtatgcggctcgttcgcgtctcattttttcagatattgcaggtactataatattaaaaataagaatgaaataacataggattaaaaataaagttatcatgacttctagcgctgatttaactaacttaaaagaattacttagtctgtacaaaagtttgagattttcagattctgcggctatagaaaagtataattctttggtagaatggggaacatctacttactggaaaataggcgtgcaaaaggtagctaatgtcgagacgtcaatatctgattattatgatgaggtaaaaaataaaccgtttaatattgatccgggctattacattttcttaccggtatattttgggagcgtctttatttattcgaagggtaaaaatatggtagaacttggatctggaaactcttttcaaataccagatgatatgcgaagtgcgtgtaacaaagtattagacagcgataacggaatagactttctgagatttgttttgttaaacaatagatggataatggaagatgctatatcaaaatatcagtctccagttaatatatttaaactagctagtgagtacggattaaacatacccaaatatttagaaattgaaatagaggaagacacattatttgacgacgagttatactctattatagaacgctctttcgatgataaatttccaaaaatatccatatcgtatattaagttgggagaacttagacggcaagttgtagactttttcaaattctcattcatgtatattgagtccatcaaggtagatcgtataggagataatatttttattcctagcgttataacaaaatcaggaaaaaagatattagtaaaagatgtagaccatttaatacgatccaaggttagagaacatacatttgtaaaagtaaaaaagaaaaacacattttccattttatacgactatgatggaaacggaacagaaactagaggagaagtaataaaacgaattatagacactataggacgagactattatgttaacggaaagtatttctctaaggttggtagtgcaggcttaaagcaattgactaataaattagatattaatgagtgcgcaactgtcgatgagttagttgatgagattaataaatccggaactgtaaaacgaaaaataaaaaaccaatcagcatttgatttaagcagagaatgtttgggatatccagaagcggattttataacgttagttaataacatgcggttcaaaatagaaaattgtaaggttgtaaatttcaatattgaaaatactaattgtttaaataacccgagtattgaaactatatatggaaactttaaccagttcgtctcaatctttaatgtcgtcaccgatgtcaaaaaaagattattcgagtgaaataatatgcgcctttgatataggtgcaaaaaatcctgccagaactgttttagaagtcaaggataactccgttagggtattggatatatcaaaattagactggagttctgattgggaaaggcgcatagctaaagatttgtcacaatatgaatacactacagttcttctagaacgtcagcctagaaggtcgccgtatgttaaatttatctattttattaaaggctttttatatcatacatcggctgccaaagttatttgcgtctcgcctgtcatgtctggtaattcatatagagatcgaaaaaagagatcggtcgaagcatttcttgattggatggacacattcggattgcgagactccgttccggatagacgcaaattagacgatgtagcggatagtttcaatttggctatgagatacgtattagataaatggaatactaattatacaccttataataggtgtaaatctagaaattacataaaaaaaatgtaataacgttagtaacgccattatggataatctatttacctttctacatgaaatagaagatagatatgccagaactatttttaactttcatctaataagttgcgatgaaataggagatatatatggtcttatgaaagaacgcatttcctcagaggatatgtttgataatatagtgtataataaagatatacatcctgccattaagaaactagtgtattgcgacatccaacttactaaacacattattaatcagaatacgtatccggtatttaacgattcttcacaagtgaaatgttgtcattatttcgacataaactcagataatagcaatattagctctcgtacagtagagatatttgagagggaaaagtcatctcttgtatcatatattaaaactaccaataagaagagaaaggtcaattacggcgaaataaagaaaactgttcatggaggcactaatgcaaattacttttccggtaaaaagtctgacgagtatctgagtactacagttagatccaacattaatcaaccttggatcaaaaccatctctaagaggatgagagttgatatcattaatcactctatagtaacgcgtggaaaaagctctatattacaaactatagaaattatttttactaatagaacatgtgtgaaaatattcaaggattctactatgcacattattctatccaaggacaaggatgaaaaggggtgtatacacatgattgacaaattattctatgtctattataatttatttctgttgttcgaagatatcatccaaaacgagtactttaaagaagtagctaatgttgtaaaccacgtactcacggctacggcattagatgagaaattattcctaattaagaaaatggctgaacacgatgtttatggagttagcaatttcaaaatagggatgtttaacctgacatttattaagtcgttggatcataccgttttcccctctctgttagatgaggatagcaaaataaagttttttaaggggaaaaagctcaatattgtagcattacgatctctggaggattgtataaattacgtgactaaatccgagaatatgatagaaatgatgaaggaaagatcgactattttaaatagcatagatatagaaacggaatcggtagatcgtctaaaagaattgcttctaaaatgaaaaaaaacactaattcagaaatggatcaacgactagggtataagtttttggtgcctgatcctaaagccggagttttttatagaccgttacatttccaatatgtatcgtattctaattttatattgcatcgattgcatgaaatcttgaccgtcaagcggccactcttatcgtttaagaataatacagaacgaattatgatagaaattagcaatgttaaagtgactcctccagattactcacctataatcgcgagtattaaaggtaagagttatgacgcattagccacgttcactgtaaatatctttaaagaggtaatgaccaaagagggtatatccatcactaaaataagtagttatgagggaaaagattctcatttgataaaaattccgctactaataggatacgggaataaaaatccacttgatacagccaagtatcttgttcctaatgtcataggtggagtctttatcaataaacaatctgtcgaaaaagtaggaattaatctagtagaaaagattacaacatggccaaaatttagggttgttaagccaaactcattcactttctcgttttcctccgtatcccctcctaatgtattaccgacaagatatcgccattacaagatatctctggatatatcacaattggaagcgttgaatatatcatcgacaaagacatttataacggtcaatattgttttgctgtctcaatatttatctagagtgagtctagaattcattagacgtagtttatcatacgatatgcctccagaagttgtctatctagtaaacgcgataatagatagtgctaaacgaattactgaatctattactgactttaatattgatacatacattaatgacctggtggaagctgaacacattaaacaaaaatctcagttaacgattaacgagttcaaatatgaaatgctgcataactttttacctcatatgaactatacacccgatcaactaaagggattttatatgatatctttactaagaaagtttctctactgtatcttccacacttctagatatccagatagagattcgatggtttgtcatcgcatcctaacgtacggcaaatattttgagacgttggcacatgatgaattagagaattacataggcaacatccgaaacgatatcatgaacaatcacaagaacagaggcacttacgcggtaaacattcatgtactaacaactcccggacttaatcatgcattttctagtctattgagtggaaagttcaaaaagtcagacggtagttatcgaacacatcctcactattcatggatgcagaatatttctattcctaggagtgttggattttatccggatcaagtaaagatttcaaagatgttttctgtcagaaaataccatccaagtcaatatctttacttttgttcatcagacgttccggaaagaggtcctcaggtaggtttagtatctcaattgtctgtcttgagttccattacaaatatactaacgtctgagtatttggatttggaaaagaaaatttgtgagtatatcagatcatattataaagatgatataagttactttgaaacaggatttccaatcactatagaaaatgctctagtcgcatctcttaatccaaatatgatatgtgattttgtaactgactttagacgtagaaaacggatgggattcttcggtaacttggaggtaggtattactttagttagggatcacatgaatgaaattcgcattaatattggagcaggaagattagtcagaccattcttggttgtggataacggagagctcatgatggatgtgtgtccggagttagaaagcagattagacgacatgacattctctgacattcagaaagagtttccgcatgtcattgaaatggtagatatagaacaatttacttttagtaacgtatgtgaatcggttcaaaaatttagaatgatgtcaaaggatgaaagaaagcaatacgatttatgtgactttcctgccgaatttagagatggatatgtagcatcttcactagtgggaatcaatcacaattctggacccagagctattcttggatgtgctcaagctaaacaagctatctcttgtctgagctcggatatacgaaataaaatagacaatggaattcatttgatgtatccagagaggccaatcgtgattagtaaggctttagaaacttcaaagattgcggctaattgcttcggccaacatgttactatagcattaatgtcgtacaaaggtatcaatcaagaggatggaattatcatcaaaaaacaatttattcagagaggcggtctcgatattgttacagccaagaaacatcaagtagaaattccattggaaaactttaataacaaagaaagagataggtctaacgcctattcaaaattagaaagtaatggattagttagactgaatgctttcttggaatccggagacgctatggcacgaaatatctcatcaagaactcttgaagatgattttgctagagataatcagattagcttcgatgtttccgagaaatataccgatatgtacaaatctcgcgttgaacgagtacaagtagaacttactgacaaagttaaggtacgagtattaaccatgaaagaaagaagacccattctaggagacaaatttaccactagaacgagtcaaaagggaacagtcgcgtatgtcgcggatgaaacggaacttccatacgacgaaaatggtatcacaccagatgtcattattaattctacatccatcttctctagaaaaactatatctatgttgatagaagttattttaacagccgcatattctgctaagccgtacaacaataagggagaaaaccgacctgtctgttttcctagtagtaacgaaacatccatcgatacatatatgcaattcgctaaacaatgttatgagcattcaaatccgaaattgtctgatgaagaattatcggataaaatcttttgtgaaaagattctctatgatcctgaaacggataagccttatgcatccaaagtattttttggaccaatttattacttgcgtctgagacatttaactcaggacaaggcaaccgttagatgtagaggtaaaaagacgaagctcattagacaggcgaatgagggacgaaaacgtggaggaggtatcaagttcggagaaatggagagagactgtttaatagcgcatggtgcagccaatactattacagaagttttgaaagattcggaagaagattatcaagatgtgtatgtttgtgaaaattgtggagacatagcagcacaaatcaagggtattaatacatgtcttagatgttcaaaacttaatctctctcctctcttaacaaaaattgataccacgcacgtatctaaagtatttcttactcaaatgaacgccagaggcgtaaaagtcaaattagatttcgaacgaaggcctccttcgttttataaaccattagataaagttgatctcaagccgtcttttctggtgtaatattctagtttggtagtagatacatatcaatatcatcaaattcgagatccgaattataaaatgggcgtggattgttaactatagaatcggacgtctgatattcgaaaatctgtggagtttcaggttttggtggaggtgtaactgctacttgggatactgaagtctgatattcagaaagctgtggatgttctggttcggcatccaccgatggtgtcacatcactaatcggttcggtaacgtctgtggatggaggtgctacttctacagaacctgtagcctcagttgtcaacggagatacatttttaatgcgagaaaatgtataatttggtaatggtttcttatgtggatctgaagaagaggtaagatatctactagaaagataccgatcacgttctagttctcttttgtagaacttaactttttctttctccgcatctagttgatattccaacctcttcacgttactacgttcagattccaattcacgttcgcatgggttacctccgcagtttttacgagcgatttcacgttcagccttcatgcgtctctccctctctctatcgagtttatcagagcagtctttctgaaggcgatcgaactccataaatttctccaacgctttgattgtttccatagatttccgaagttcagcttttaggactgtgattctttttctttcgaattcacagctggatgtacaaccgtttccattaccgccatctctaagtttcttttctagatcggcaacatttcatccccatgccttttacattcctcgagtctactgtcgtcgaaatatcgttccagctccttttcgacatcaataactttagcacgttgtctctcaagctctcttttgtagttatctgattccctggcacgtttaagatcttcatgcaattgagtcagctcttaacttcctctcttgcttcttcgtcatagtacgcgcaatcactgtgagatccattgttaccacgtctacactcggcgagctcgcgtttaagagattcaatttcccgtttgtattggtccatgtttccattgctaccaccattagatttacaggctgctagttgtcgttcgagatcagaaatacgggttttcttggaattgatttcgtcgatgtacttggcatcgaaacacttattaagttctttttccaattctacgattttatttctttcgcgagtcaattccctcctgtagtaactatctgttttgtcagattcacgctctctacgtagactttcttgcaagttactaatttgttccctagcacgtccgagtttagttttatatgctgaatagagttctgattcatcctttgagcagatctctagcgatcgtttaagattcctaattctagtctttagcctatttacctcctcagaagatgttccgttaccgttgcgtttacactcgttaagctgtctatcaagatccatgattctatctctaagacgttgcatctctctttccatatcagcattgctttcattattacgtctgcagtcactcaactgtctttcaatatctgagattctatctctaagacgtcgcatctctctctgtttcggcattggtttcattattacgtttacagtcgttcaactgtctttcaagatctgatattctagattggagtctgctaatctctgtagcattttcacggcattcactcagttgtctttcaagatctgaaattttagattggagtctgctaatctctgtaagatttcctcctccgctctcgatgcagtcggtcaacttattctctagttctctaatacgcgaacgcagtgcatcaacttcttgcgtgtcttcctggttgcgtgtacattcatcgagtctagattcgagatctctaacgcgtcgtcgttcttcctcaagttctctgcgtactacagaaagcgtgtccttatcttgttgatatttagcaatttctgattctagagtactgattttgcttacgtagttactaatatttgtcttggccttatcaagatcctccttgtatttgtcgcattccttgatatccctacgaagtctggacagttcccattcgacattacgacgtttatcgatttcagctcggagatcgtcatcgcgttgttttagccacatacgactgagttcaagttctcgttgacaagatccatctacttttccattcctaatagtatccagttccttttctagttctgaacgcatttctcgttccctatcaagcgattctctcaattctcggatagtcttcttatcaatttctaataaatctgaaccatcatctgtcccattttgaatatccctgtgttctttgatctcttttgtaagtcggtcgattctttcggttttataaacagaatccctttccaaagtcctaatcttactgagtttatcactaagttctgcattcaattcggtgagttttctcttggcttcttccaactctgttttaaactctccactatttccgcattcttcctcgcatttatctaaccattcaattagtttattaataactagttggtaatcagcgattcctatagccgttcttgtaattgtgggaacataattaggatcttctaatggattgtatggcttgatagcatcatctttatcattattagggggatggacaaccttaattggttggtcctcatctcctccagtagcgtgtggttcttcaataccagtgttagtaataggcttaggcaaatgcttgtcgtacgcgggcacttcctcatccatcaagtatttataatcgggttctacttcagaatattcttttctaagagacgcgacttcgggagttagtagaagaactctgtttctgtatctatcaacgctggaatcaatactcaagttaaggatagcgaatacctcatcgtcatcatccgtatcttctgaaacaccatcatatgacatttcatgaagtctaacgtattgataaatagaatcagatttagtattaaacagatccttaacctttttagtaaacgcatatgtatattttagatctccagatttcataatatgatcacatgccttaaatgtcagtgcttccatgatataatctggaacactaatgggtgacgaaaaagatacagcaccatatgctacgttgataaataaatctgaaccactaagtagataatgattaatgttaagaaagaggaaatattcagtgtataggtatgtcttggcgtcatatcttgtactaaacacgctaaacagtttgttaatgtgatcaatttccaatagattaattagagcagcgggaataccaacaaacatattaccacatccgtattttctatgaatatcacatatcatgttaaaaaatcttgatagaagagcgaatatctcgtctgacttaatgagtcgtagttcagcagcaacataagtcataactgtaaatagaacatactttcctgtagtgttgattctagactccacatcaacaccattattaaaaatagttttatatacatctttaatctgctctccgttaatcgtcgaacgttctagtatacggaaacactttgatttcttatctgtagttaatgacttagtgatatcacgaagaatattacgaattacatttcttgtttttcttgagagacctgattcagaactcaactcatcgttccatagtttttctacctcagtggcgaaatctttggagtgcttggtacatttttcaataaggttcgtgacctccatttattataaaaaatttattcaaaacttaactacaatcgggtaattataaaatcgtagatctcccatgtggcggaatactaccatctatcgcatgtggatggacagtaggtaatggccatgggaacagtaatgtttgcatatttatctttcttgccagtattactgcatattgtcccaatgtttcgatgtgatgttctaacctatcaactgccgctgtatcacaacaatagtgtccgatgaaattaagattatgatccaatgtgtttaatatatgattatcaagtcttatacgatccgcgtcttttttgacaggatcaggttcttctacaggaagaagtttcggcctcttatgatattcatgtctgggaaacggtggtctagggtgaggctccggtatcggagtgggttttggattataatcatcatcgtctatgacatcatcttcgacttcgatatttattttgctatcttgatgatgtcctgtatcagttgcattttcagcactcgactgaatattagcgcattcattgtctattattaccatatttctaaacccaaaatgtatgtgttgaacatcagtactatcgttgatgagtcttatagcatgaattcgcttatcgttatcgggtttatcttctgtcaccttagcaattccttttttattaaactctacataatcatatccatttctattgtttgttctaatataaacgagtatagcatcattgctaaatttttcaatagtatcaaaaacagaatatcctaaaccatataatatatattcaggaacactcaaactaaatgtccaggattctcctaaatacgtaaactttaatagtgcgaaatcattcaaaaatctaccacttatagatagatagtacataaatgcgtatagtagtctacctatctctttattatgaaaaccggcattacgatcatatatgtcgtgatatacctgtgatccgtttacgttaaaccataaatacatgggtgatcctataaacatgaatttatttctaattctcagagctatagttaattgaccgtgtaatatttgcttacatgcatacttgatacgcttattaataagatttttatcattgctcgttatttcagaatcgtatatataaggagtaccatcgtgattcttaccagatattatacaaaatactatatataaaatatattgacccacgttagtaatcatataaatgtttaacgttttaaattttgtattcaatgatccattatcatacgctatcatggtcttgtaatattcattctttaaaatataatattgtgttagccattgcattggagctcctaatggagattttctattctcatccattttaggataggctttcataaagtccctaataacttcgtgaataatgtttctatgttttctactgatgcatgtatttgcttcgatttttttatcccatgtttcatctatcatagatttaaacgcagtaatgctcgcaacattaacatcttgaaccgttggtacaattccgttccataaatttataatgttcgccatttatataactcattttttgaatatacttttaattaacaaaagagttaagttactcatatggacgccgtccagtctgaacatcaatctttttagccagagatatcatagccgctcttagagtttcagcgtgattttccaacctaaatagaacttcatcgttgcgtttacaacacttttctatttgttcaaactttgttgttacattagtaatctttttttccaaattagttagccgttgtttgagagtttcctcattgtcgtcttcatcggctttaacaattgcttcgcgtttagcctctggctttttagcagcctttgtagaaaaaaattcagttgctggaattgcaagatcgtcatctccggggaaaagagttccgtccatttaaagtacagattttagaaactgacactctgcgttatttatatttggtacaacacatggattataaatattgatgttaataacatcagaaaatgtaaagtctatacattgttgcatcgtgttaaattttctaatggatctagtattattgggtccaacttctgcctgaaatccaaatatggaagcggatacaaaaccgtttcctggataaaccacacatctccacttttgctttacatcagaaattgtgtcgttgacatcttgaactctcctatctaatgccggtgttccacctatagattttgaatattcgaatgctgcatgagtagcattaaattccttaatattgccataattttcatatattgagtaaccctggataaaaagtaaacacaccgcagccgtcgctaccacaataaaaaaaattgatagagagttcatttataatctattagaagctgacaaaatttttttacacgcatcagacaatgctttaataaatagttcaacatctacttttgtcatatcgaaccgatggtatgattctaacctagaattacatccgaaaaagttgactatgttcatagtcattaagtcattaacaaacaacattccagactctggattataagacgatactgtttcgtcacaattacctaccttaatcatgtgattatgaatattggctattagagcaccttctaagaaatctataatatctttgaaacacgatttaaaatcaaaccacgaatatacttctacgaagaaagttagtttacccataggagaaataactataaatggagatctaaatacaaaatccggatctatgatagttttaacattattatattctctattaaatacctccacatctaaaaatgttaattttgaaactatgtcttcgtttattaccgtacctgaactaaacgctataagctctattgtttgagaactctttaaacgatattcttgaaatacatgtaacaaagtttcctttaactcggtcggtttatctaccatagttacagaatttgtatccttatctataatataataatcaaaatcgtataaagttatataattatcgcgttcagattgggatcttttcaaatagactaaaaaccccatttctctagtaagtatcttatgtatatgtttgtaaaatatcttcatggtgggaatatgctctaccgcagttagccattcctcattgacagcggtagatgtattagacaaaactattccaatgtttaacaagggccattttacgagattattaaatccttgtttgataaatgtagccaatgagggttcgagttcaacgacgattgaattctcttcccgcggatgctgcatgatgaacgacgggatgttgttcgattgatttggaattctttttcgactttttgtttatattaaatattttaaaatttatagcggatagcaattcatgtaccacggataatgtagacgcgtattgcgcatcgatatctttattattagataaatttatcaataaatgtgagaagtttgcctcgttaaggtcttccatttaaatattatataaacatttgtgtttgtaacttattcgtcttttatggaatagttttttactagtaaagctgcaattacacactttgtccgtaaaacataaatataaacaccagcttttatcaatcgttccaaaaagtcgacggcggacatttttaacatggcatctattttaaatacacttaggtttttggaaaaaacatcattttataattgtaacgattcaataactaaagaaaagattaagattaaacataagggaatgtcatttgtattttataagccaaagcattctaccgttgttaaatacttgtctggaggaggtatatatcatgatgatttggttgtattggggaaggtaacaattaataatctaaagatgatgctattttacatggatttatcatatcatggagtgacaagtagtggagcaatttacaaattgggatcgtctatcgatagactttctctaaataggactattgttacaaaagttaataattatgatgatacattttttgacgacgatgattgatcgctattgcacaattttgtttttgtactttctaatatagtgtttaggttctttttcatatgagaatattgatttactaaaatatctatgtttaacttttgttctatgacgtccttatcggcggtatcggtacatatacgtaattcaccttcacaaaatacggagtcttcgataataatagccaatcgattattggatctagctgtctgtatcatattcaacatgtttaatatatcctttcgtttcccctttacaggcatcgatcgtagcatattttccgcgtctgatatggaaatgttaaaactacaaaaatgcgtaatgttagcccgtcctaatattggtacgtgtctataagtttggcatagtagaataatagacgtgtttaaatgccttccaaagtttaagaattctattagagtattgcattttgatagtttatcgcctacatcatcaaaaataagtaaaaagtgtgctgattttttatgattttgtgcgacagcaatacatttttctatgttacttttagttcgtatcagattatattctagagattcctgactactaacgaaattaatatgatttggccaaatgtatccatcataatctgggttataaacgggtgtaaacaagaatatatgtttatattttttaactagtgtagaaaacagagatagtaaatagatagtttttccagatccagatcctcctgttaaaaccattctaaacggcatttttaataaattttctcttgaaaattgtttttcttggaaacaattcataattatatttacagttactaaattaatttgataataaatcaaaatatggaaaactaaggttgttagtagggaggagaacaaagaaggcacatcgtgatataaataacatttattatcatgatgacaccagaaaacgacgaagagcagacatctgtgttctccgctactgtttacggagacaaaattcagggaaagaataaacgcaaacgcgtgattggtctatgtattagaatatctatggttatttcactactatctatgattaccatgtccgcgtttctcatagtgcgcctaaatcaatgcatgtctgctaacgaggctgctattactgacgccgctgttgccgttgctgctgcatcatctactcatagaaaggttgcgtctagcactacacaatatgatcacaaagaaagctgtaatggtttatattaccagggttcttgttatatattacattcagactaccagttattctcggatgctaaagcaaattgcactgcggaatcatcaacactacccaataaatccgatgtcttgactacctggctcattgattatgttgaggatacatggggatctgatggtaatccaattacaaaaactacatccgattatcaagattctgatgtatcacaagaagttagaaagtatttttgtgttaaaacaatgaactaatatttatttttgtacattaataaatgaaatcgcttaatagacaaactgtaagtaggtttaagaagttgtcggtgccggccgctataatgatgatactctcaaccattattagtggcataggaacatttctgcattacaaagaagaactgatgcctagtgcttgcgccaatggatggatacaatacgataaacattgttatttagatactaacattaaaatgtctacagataatgcggtttatcagtgtcgtaaattacgagccagattgcctagacctgatactagacatctgagagtattgtttagtattttttataaagattattgggtaagtttaaaaaagaccaataataaatggttagatattaataatgataaagatatagatattagtaaattaacaaattttaaacaactaaacagtacgacggatgctgaagcgtgttatatatacaagtctggaaaactggttaaaacagtatgtaaaagtactcaatctgtactatgtgttaaaaaattctacaagtgacaacaaaaaatgaattaataataagtcgttaacgtacgccgccatggacgccgcgtttgttattactccaatgggtgtgttgactataacagatacattgtatgatgatctcgatatctcaatcatggactttataggaccatacattataggtaacataaaaactgtccaaatagatgtacgggatataaaatattccgacatgcaaaaatgctactttagctataagggtaaaatagttcctcaggattctaatgatttggctagattcaacatttatagcatttgtgccgcatacagatcaaaaaataccatcatcatagcatgcgactatgatatcatgttagatatagaagataaacatcagccattttatctattcccatctattgatgtttttaacgctacaatcatagaagcgtataacctgtatacagctggagattatcatctaatcatcaatccttcagataatctgaaaatgaaattgtcgtttaattcttcattctgcatatcagacggcaatggatggatcataattgatgggaaatgcaatagtaattttttatcataaaagttgtaaagtaaataataaaacaataaatattgaactagtagtacgtatattgagcaatcagaaatgatgctggtacctcttatcacggtgaccgtagttgcgggaacaatattagtatgttatatattatatatttgtaggaaaaagatacgtactgtctataatgacaataaaattatcatgacaaaattaaaaaagataaagagttctaattccagcaaatctagtaaatcaactgatagcgaatcagactgggaggatcactgtagtgctatggaacaaaacaatgacgtagataatatttctaggaatgagatattggacgatgatagcttcgctggtagtttaatatgggataacgaatccaatgttatggcgcctagcacagaacacatttacgatagtgttgctggaagcacgctgctaataaataatgatcgtaatgaacagactatttatcagaacactacagtagtaattaatgaaacggagactgttaaagtacttaatgaagataccaaacagaatcctaactattcatccaatcctttcgtaaattataataaaaccagtatttgtagcaagtcaaatccgtttattacagaacttaacaataaatttagtgagaataatccgtttagacgagcacatagcgatgattatcttaataagcaagaacaagatcatgaacacgatgatatagaatcatcggtcgtatcattggtgtgattagtttcctttttataaaattgaagtaatatttagtattattgctgccgtcacgttgtacaaatggagatattccctgtattcggcatttctaaaattagcaattttattgctaataatgactgtagatattatatagatacagaacatcaaaaaattatatctgatgagatcaatagacagatggatgaaacggtacttcttaccaacatcttaagcgtagaagttgtaaatgacaatgagatgtaccatcttattcctcatagattatcgacgattatactctgtattagttctgtcggaggatgtgttatctctatagataatgacatcaatggcaaaaatattctaacctttcccattgatcatgctgtaatcatatccccactgagtaaatgtgtcgtagttagcaagggtcctacaaccatattggttgttaaagcggatatacctagcaaacgattggtaacatcgtttacaaacgacatactatatgtaaacaatctgtcactgattaattatttgccgttgtctgtattcattattagacgagtcaccgactatttggatagacacatatgcgatcagatatttgctaataataagtggtattcccttataaccatcgacgataagcaatatcctattccatcaaactgtataggtatgtcctctgccaagtacataaattctagcatcgagcaagatactttaatccatgtttgtaacctcgagcatccgttcgactcagtatacaaaaaaatgcagtcgtacaattctctacctatcaaggaacaaatattgtacggtagaattgataatataaatatgagcattagtatttctgtggattaatagatttctagtatggggatcattaatcatctctaatctctaaatacctcataaaacgaaaaaaaagctattatcaaatactgtacggaatggattcattctcttctctttttatgaaactctgttgtatatctactgataaaactggaagcaaaaaatctgatagaaagaataagaataagatcaaggattatatggaacacgattattataaaataacaatagttcctggttcctcttccacgtctactagctcgtggtattatacacatgcctagtaatagtctctttgcgttgacggaaagcagactagaaataacaggctaaaatgttcagacaccataatagttcccaacccagataataacagagttccatcaacacattcctttaaactcaatcccaaacccaaaaccgttaaaatgtatccggccaattgatagtagataatgaggtgtacagcgcatgataatttacacagtaaccaaaatgaaaacactttagtaattataagaaatatagacggtaatgtcatcatcaacaatccaataatatgcctgagagtaaacattgatggataaaacaaaaatgctccgcataactctatcatggcaataacacaaccaaatacttgtaagattcctaaattagtagaaaatacaacggatatcgatgtataagtgatctcgagaaataataagaataaagtaatgcccgtaaagataaacatcaacattgtttggtaatcattaaaccaattagtatgaagttgaactaatttcacagtagattttattccagtattatccccgcatgtatacgtacctggtaagatatctttatattccataatcaatgagacatcactatccgataacgaatgaagtctagcactagtatgccatttacttaatatggtcgtcttggaagttttattataagttaaaatatcatggttatccaatttccatctaatatactttgtcggattatctatagtacacggaataatgatggtatcattacatgctgtatactctatggtctttgtagttgttataacaaccaacgtatagaggtatatcaacgatattctaactcttgacattttttatttatttaaaatgatacctttgttatttattttattctattttgctaacggtattgaatggcataagtttgaaacgagtgaagaaataatttctacttacttattagacgacgtattatacacgggtgttaatggggcggtatacacattttcaaataataaactaaacaaaactggtttaactaataataattatatcacaacatctataaaagtagaggatgcggataaggatacattagtatgcggaaccaataacggaaatcccaaatgttggaaaatagacggttcagacgacccaaaacatagaggtagaggatacgctccttatcaaaatagcaaagtaacgataatcagtcacaacggatgtgtactatctgacataaacatatcaaaagaaggaattaaacgatggagaagatttgacggaccatgtggttatgatttatacacggcggataacgtaattccaaaagatggtttacgaggagcattcgtcgataaagatggtacttatgacaaagtttacattcttttcactgatactatcggctcaaagagaattgtcaaaattccgtatatagcacaaatgtgcctaaacgacgaaggtggtccatcatcattgtctagtcatagatggtcgacgtttctcaaagtcgaattagaatgtgatatcgacggaagaagttatagacaaattattcattctagaactataaaaacagataatgatacgatactatatgtattcttcgatagtccttattccaagtccgcattatgtacctattctatgaataccattaaacaatctttttctacgtcaaaattggaaggatatacaaagcaattgccgtctccagctcctggtatatgtttaccagctggaaaagttgttccacataccacgtttgaagtcatagaaaaatataatgtactagatgatattataaagcctttatctaaccaacctatcttcgaaggaccgtctggtgttaaatggttcgatataaaggagaaggaaaatgaacatcgggaatatagaatatacttcataaaagaaaattctatatattcgttcgatacaaaatctaaacaaactcgtagctcgcaagtcgatgcgcgactattttcagtaatggtaacttcgaaaccgttatttatagcagatatagggataggagtaggaatgccacaaatgaaaaaaatacttaaaatgtaatcttaatcgagtacaccacacgacaatgaacaaacataagacagattatgctggttatgcttgctgcgtaatatgcggtctaattgttggaattatttttacagcgacactattaaaagttgtagaacgtaaattagttcatacaccatcaatagataaaacgataaaagatgcatatattagagaagattgtcctactgactggataagctataataataaatgtatccatttatctactgatcgaaaaacctgggaggaaggacgtaatgcatgcaaagctctaaatccaaattcggatctaattaagatagagactccaaacgagttaagttttttaagaagcattagacgcggatattgggtaggagaatccgaaatattaaaccagacaaccccatataattttatagctaagaatgccacgaagaatggaactaaaaaacggaaatatatttgtagcacaacgaatactcccaaactgcattcgtgttacactatataacaattacactacatttttatcataacactacttcggttagatgttttagaaaaaaataaatatcgccgtaccgttcttgtttttataaaaataacaattaacaattatcaaattttttctttaatattttacgtggttgaccattcttggtggtaaaataatctcttagtgttggaatggaatgctgtttaatgtttccacactcatcgtatattttgacgtatgcagtcacatcgtttacgcaatagtcagactgtagttctatcatgcttcctacattagaaggaggaacagttttaaagtctcttggttttaatctattaccgttagttttcatgaaatcctttgttttatccacttcacattttaaataaatgtccactatacattcttttgttaattttactagatcgtcatgggtcatagaatttataggttccgtagtccatggatccaaactagcaaacttcgcgtatacggtatcgcgattagtgtatacaccaactgtatgaaaattaagaaaacagtttaatagatcaacagaaatatttaatcctccgtttgatacagatgcgccatatttatggatttcggattcacacgttgtttgtctgaggtgttcgtctagtgttgcttctacgtaaactttgattcccatatattctttattgtcagaatcgcataccgatttatcatcatacactgtttgaaaactaaatggtatacacatcaaaataacaaatactaacgagtacattctgcaatattgttatcgtaattggaaaaatagtgttcgagtgagttggattatgtgagtattggattgtatattttattttatattttgtaataagaataaaatgctaatgtcaagtttattccaatagatgtcttattaaaaacatatataataaataacaatggctgaatggcataaaattatcgaggatatctcaaaaaataataagttcgaggatgccgccatcgttgattacaagactacaaagaatgttctagctgctattcctaacagaacatttgccaagattaatccgggtgaaattattcctctcatcactaatcgtaatattctaaaacctcttattggtcagaaatattgtattgtatatactaactctctaatggatgagaacacgtatgctatggagttgcttactgggtacgcccctgtatctccgatcgttatagcgagaactcataccgcacttatatttttgatgggtaagccaacaacatccagacgtgacgtgtatagaacgtgtagagatcacgctacccgtgtacgtgcaactggtaattaaaataaaaagtaatattcatatgtagtgtcaattttaaatgatgatgatgaaatggataatatccatattgacgatgtcaataatgccggtattggcatacagttcatcgatttttagatttcattcagaggatgtggaattatgttatgggcatttgtattttgataggatctataatgtagtaaatataaaatataatccgcatattccatatagatataattttattaatcgcacgttaaccgtagatgaactagacgataatgtcttttttacacatggttattttttaaaacacaaatatggttcacttaatcctagtttgattgtctcattatcaggaaacttaaaatataatgatatacaatgctcagtaaatgtatcgtgtctcattaaaaatttggcaacgagtacatctactatattaacatctaaacataagacttattctctacatcggtccacgtgtattactataataggatacgattctattatatggtataaagatataaatgacaagtataatgacatctatgattttactgcaatatgtatgctaatagcgtctacattgatagtgaccatatacgtgtttaaaaaaataaaaatgaactcttaattatgctatgctattagaaatggataaaatcaaaattacggttgattcaaaaattggtaatgttgttaccatatcgtataacttggaaaagataactattgatgtcacacctaaaaagaaaaaagaaaaggatgtattattagcgcaatcagttgctgtcgaagaggcaaaagatgtcaaggtagaagaaaaaaatattatcgatattgaagatgacgatgatatggatgtagaaagcgcgtaatacgatctataaaaataagtatataaatactttttatttactgtactcttactgtgtagtggtgataccctactcgattatttttttaaaaaaaaaatacttattctgattcttctagccatttccgtgttcgtttgaatgccacatcgacgtcaaagataggggagtagttgaaatctagttctgcattgttggtacgcacctcaaatgtagtgttggatatcttcaacgtatagttgttgagtagtgatggttttctaaatagaattctcttcatatcattcttgcacgcgtacatttttagcatccatcttggaatcctagatccttgttctattcccaatggtttcatcaatagaagattaaacatatcgtacgaacacgatggagagtaatcgtagcaaaagtaagcatttcctttaatcttagatcccggatactggatatattttgcagccaacacgtgcatccatgcagcatttcctacatatacccggctatgcaccgcgtcatcatcgactgtacgatacataatgttaccgtgttgcttacattgctcgtaaaagactttcatcaatttgtctccttctccgtaaattccagtgggtcttaggcaacaagtatacaattttgctccattcatgattacggaattattggctttcataaccagttgctcggccatacgtttactttttgcgtatacatgtcctggtgatatatcataaagggtatgctcatggccgatgaatggatcaccgtgtttattgggtcctattgcttccatgctactagtatagatcaaatacttgattcctaggtccacacaagctgccaaaatagtctgtgttccataatagtttactttcatgatttcattatcggtgtattttccaaatacatccactagagcagccgtatgaataatcagatttaccccatctagcgcttctctcaccttatcaaagtcgtttatatcacattgtatatagtttataaccttaactttcgaggttattggttgtggatcttctacaatatctatgactctgatttcttgaacatcatctgcactaattaacagttttactatatacctgcctagaaatccggcaccaccagtaaccgcgtacacggccattgctgccactcataatatcagactacttattctattttactaaataatggctgtttgtataatagaccacgataatatcagaggagttatttactttgaaccagtccatggaaaagataaagttttaggatcagttattggattaaaatccggaacgtatagtttgataattcatcgttacggagatattagtcaaggatgtgattccataggcagtccagaaatatttatcggtaacatctttgtaaacagatatggtgtagcatatgtttatttagatacagatgtaaatatatctacaattattggaaaggcgttatctatttcaaaaaatgatcagagattagcgtgtggagttattggtatttcttacataaatgaaaagataatacattttcttacaattaacgagaatggcgtttgatatatcagttaatgcgtctaaaacaataaatgcattagtttacttttctactcagcaaaataaattagtcatacgtaatgaagttaatgatacacactacactgtcgaatttgatagggacaaagtagttgacacgtttatttcatataataaacataatgacaccatagagataagaggggtgcttccagaggaaactaatattggttgcgcggttagtatgacttacttgtataataagtatagttttaaactgattttagcagaatatataagacacagaaatactatatccggcaatatttattcggcattgatgacactagatgatttggctattaaacagtatggagacattgatctattatttaatgagaaacttaaagtagactccgattcgggactatttgactttgtcaactttgtaaaggatatgatatgttgtgattctagaatagtagtagctctatctagtctagtatctaaacattgggaattgacaaataaaaagtataggtgtatggcattagccgaacatatatctgatagtattccaatatctgagctatctagactacgatacaatctatgtaagtatctacgcgggcacactgagagcatagaggatgaatttgattattttgaagacgatgattcgtctacatgttctgccgtaaccgacagggaaacggatgtataattttttttatagcgtgaaggatatgataaaaaatataattgttgtatttatcccattccaatcaccttatatgattctgtaacacaataaaggagtctcatagatgtatagaggtcagatactggtttgataaactgtttattccacataagtatgtttgactttatggttagacccgcatactttaacaaatcactgaaaattggagttaggtattgacctctcagaatcagttgccgttctggaacattaaatgtattttttatgatatactccaacgcatttatgtgggcatacaacaagtcattactaatggagtattccaagagttttagttgtctagtatttaacaagagaagagatttcaacagactgtttatgaactcgaatgccgcctcattgtcgcttatattgatgatgtcgaattctcccaatatcatcactgatgagtagctcatcttgttatcgggatccaagttttctaaagatgtcattaaaccctcgatcatgaatggatttatcatcatcgtttttatgttggacatgagcttagtccgtttgtccacatctatagacgacgatttctgaattatttcatatatccctctctttaactccaggaacttgtcaggatggtctactttaatatgttctcgtctaagagatgaaaatctttggatggttgcacgcgacttttctctaaaggatgacgttgcccaagatcctctcttaaatgaatccatcttatccttggacaagatggacagtctattttccttagatggtttaatatttttgttacccatgatctataaaggtagacctaatcgtctcggatgacctatatatttattttcagttttattatacgcataaattgtaaaaaatatgttaggtttacgaaaatgtctcgtggggcattaatcgtttttgaaggattggacaaatctggaaaaacaacacaatgtatgaacatcatggaatctataccggcaaacacgataaaatatcttaactttcctcagagatccactgtcactggaaagatgatagatgactatctaactcgtaaaaaaacctataatgatcatatagttaatctattattttgtgcaaatagatgggagtttgcatcttttatacaagaacaactagaacagggaattactttaatagttgatagatacgcattttctggagtagcgtatgccgccgctaaaggcgcgtcaatgactctcagtaagagttatgaatctggattgcctaaacccgacttagttatattcttggaatctggtagcaaagaaattaatagaaacgtcggcgaggaaatttatgaagatgttacattccaacaaaaggtattacaagaatataaaaaaatgattgaagaaggagatattcattggcaaattatttcttctgaattcgaggaagatgtaaagaaggagttgattaagaatatagttatagaggctatacacacggttactggaccagtggggcaactgtggatgtaatagtgaaattacattttttataaatagatgttagtacagtgttataaatggatgaagcatattactctggcaacttggaatcagtactcggatacgtgtccgatatgcataccgaactcgcatcaatatctcaattagttattgccaagatagaaactatagataatgatatattaaacaaggacattgtaaattttatcatgtgtagatcaaacttggataatccatttatctctttcctagatactgtatatactattatagatcaagagaactatcagaccgaattgattaattcattagacgacaatgaaattatcgattgtatagttaataagtttatgagcttttataaggataacctagaaaatatagtagatgctatcattactctaaaatatataatgaataatccagattttaaaactacgtatgccgaagtactcggttccagaatagccgatatagatattaaacaagtgatacgtaagaatatactacaattgtctaatgatatccgcgaacgatatttgtgaaaaatattaaaaaaaaatactttttttattaaatgacgtcgcttcgcgaatttagaaaattatgctgtgatatatatcacgcatcaggatataaagaaaaatctaaattaattagagactttataacagatagggatgataaatatttgatcattaagctattgcttcccggattagacgatagaatttataacatgaacgataaacaaattataaaattatatagtataatatttaaacaatctcaggaagatatgctacaagatttaggatacggatatataggagacactattaggactttcttcaaagagaacacagaaatccgtccacgagataaaagcattttaactttagaagaagtggatagttttttaactacgttatcatccgtaactaaagaatcgcatcaaataaaattattgactgatatcgcatccgtttgtacatgtaatgatttaaaatgtgtagtcatgcttattgataaagatctaaaaattaaagcgggtcctcggtacgtacttaacgctattagtcctcatgcctatgatgtgtttagaaaatctaataacttgaaagagataatagaaaatgcatctaaacaaaatctagactctatatctatttctgttatgactccaattaatcccatgttagcggaatcgtgtgattctgtcaataaggcgtttaaaaaatttccatcaggaatgtttgcggaagtcaaatacgatggtgaaagagtacaagttcataaaaataataacgagtttgccttctttagtagaaacatgaaaccagtactctctcataaagtggattatctcaaagaatacataccgaaagcatttaaaaaagctacgtctatcgtattggattctgaaattgttcttgtagacgaacataatgtaccgctaccgtttggaagtttaggaatacacaaaaagaaagaatataaaaactctaacatgtgtttgttcgtgtttgactgtttgtactttgatggattcgatatgacggacattccattgtacgaacgaagatcttttctcaaagatgttatggttgaaatacccaatagaatagtattctcagagttgacgaatattagtaacgagtctcagttaactgacgtattggatgatgcactaacgagaaaattagaaggattggtcttaaaagatattaatggagtatacgaaccgggaaagagaagatggttaaaaataaagcgagactatttgaacgagggttccatggcagattctgccgatttagtagtactaggtgcctactatggtaaaggagcaaagggtggtatcatggcagtctttctaatgggttgttacgacgatgaatccggtaaatggaagacggttaccaagtgttcaggacacgatgataatacgttaagggagttgcaagaccaattaaagatgattaaaattaacaaggatcccaaaaaaattccagagtggttagtagttaataaaatctatattcccgattttgtagtagaggatccgaaacaatctcagatatgggaaatttcaggagcagagtttacatcttccaagtcccataccgcaaatggaatatccattagatttcctagatttactaggataagagaggataaaacgtggaaagaatctactcatctaaacgatttagtaaacttgactaaatcttaatagttacatacaaactgaaaattaaaataacactatttagttggtggtcgccatggatggtgttattgtatactgtctaaacgcgctagtaaaacatggcgaggaaataaatcatataaaaaatgatttcatgattaaaccatgttgtgaaagagtttgtgaaaaagtcaagaacgttcacatcgacggacaatctaaaaacaatacagtgattgcagatttgccatatctggataatgcggtatccgatgtatgcaattcactgtataaaaagaatgtatcaagaatatccagatttgctaatttgataaagatagatgacgatgacaagactcctactggtgtatataattattttaaacctaaagatgccattcctgttatcatatctataggaaaggataaagatgtctgtgaactattaatctcatctgataaagcgtgtgcgtgtatagagttaaattcatataaagtagccattcttcccatggatgtttccttttttaccaaaggaaatgcatcattgattattctcctgtttgatttctctatcgatgcggcacctctcttaagaagtgtaaccgataataatgttattatatctagacaccagcgtctacatgacgagcttccgagttccaattggttcaagttttacataagtataaagtccgactattgttctatattatatatggttgttgatggatctgtgatgcatgcgatagctgataatagaactcacgcaattattagcaaaaatatattagacaatactacgattaacgatgagtgtagatgctgttattttgaaccacagattaggattcttgatagagatgagatgctcaatggatcatcgtgtgatatgaacagacattgtattatgatgaatttacctgatgtaggcgaatttggatctagtatgttggggaaatatgaacctgacatgattaagattgctctttcggtggctggtaatttaataagaaatcgagactacattcccgggagacgaggatatagctactacgtttacggtatagcctctagataatttttttaagcacgaaataaaaaacataattttaaaccaatctatttcatactattttgtgtgatcaccatggacataaagatagatattagtatttctggtgataaatttacggtgactactaggagggaaaatgaagaaagaaaaaaatatctacctctccaaaaagaaaaaactactgatgttatcaaacctgattatcttgagtacgatgacttgttagatagagatgagatgtttactattctagaggaatattttatgtacagaggtctattaggcctcagaataaaatatggacgactctttaacgaaattaaaaaattcgacaatgatgcggaagaacaattcggtactatagaagaactcaagcagaaacttagattaaattctgaagagggagcagataactttatagattatataaaggtacaaaaacaggatatcgtcaaacttactgtatacgattgcatatctatgataggattgtgtgcatgcgtggtagatgtttggagaaatgagaaactgttttctagatggaaatattgtttacgagcgattaaactgtttattgatgatcacatgcttgataagataaaatctatactgcagaatagactagtatatgtggaaatgtcatagaaagttaaaagttaatgagagcaaaaatatataaggttgtattccatatttgttattttttctgtaatagttaaaaaaatacattcgatggtctatctatcagattattatgtgttataaggtactttttctcataataaactagagtatgagtaagatagtgtttttcaaaacatataaatctaaaattgatggatgagatatacagctattaatttcgaaaatatattttaatctgataactttaaacatggatttttgatggtggtttaacgttttaaaaaaagattttgttattgtagtatatgataatattaaaagatggatataaagaatttgctgactgcatgtactattttttacattactacattggctacggcagatatacctacttcgtcactgccacacgctccggtaaacggggcatgtgacgagggagaatatcttgataagaggcataatcaatgttgtaatcagtgtccacctggagaatttgccaaggtcagatgtaatggtaacgataacacaaaatgtgaacgctgcccacctcatacatataccgcaatccccaattactctaatggatgtcatcaatgtagaaaatgcccaacaggatcatttgataaggtaaagtgtaccggaacacagaacagtaaatgttcgtgtcttcctggttggtattgcgctactgattcttcacagactgaagattgtcgagattgtataccaaaaaggagatgtccatgcggatactttggtggaatagatgaacaaggaaatcctatttgtaaatcgtgttgtgttggtgaatattgcgactacctacgtaattatagacttgatccatttcctccatgcaaactatctaaatgtaattaattatgattttgatgataatgttaccatacattatatcgctacttggttagtgtattattcagtatgaagacctattaataattacttatcttttgacgatcttgttataattataatataaaaacttatggcatagtaacttataattgctgacgcgataaattcgtaataatctgttttgttcaaaggaatctacaggcataaaaataaaaatataatttataatatactcttacagcgcgccatcatgaataacagcagtaaattaattgctgttattaatggatttagaaatagtggacgattttgtgatattaatatagttattaatgatgaaaggataaacgctcacagactcatcctatctggagcctccgaatatttttccattctgttttccaataattttatcgattctaatgaatacgaagttaatctaagtcatttagattatcaaagcgtaaacgatttgatcgattacatttatgggatacctttgagcctaactaacgataacgtgaaatatattctttcaaccgctgattttttacaaattggatctgctattacggagtgtgaaaattacatacttaaaaatctttgttctagaaactgtatcgatttctacatatacgctgataaatataataacaagaaaatagaatcagcgtcgtttaacacaatattacaaaatattttgagactcatcaacgatgaaaactttaaatacttaacagaggaatcaatgataaaaattttaagcgatgatatgttaaatataaaaaatgaggatttcgccccactaattctcattaaatggttagagagtactcaacaatcatgcaccgtcgagttacttagatgcctcagaatatcattgctttccccacaagttataaaatcactttatagtcatcaactggttagttcaatctacgaatgtataacattcttaaacaatatagcattcttggatgaatcatttcctagataccatagcatcgagttgatatctatcggtataagtaattcgcatgataagatttccataaactgctacaatcataaaaaaaatacatgggaaatgatatcttcacgtagatataggtgtagtttcgcagtggccgtcctggataatattatctatatgatgggtggatatgatcagtccccgtatagaagttcaaaggttatagcgtacaatacatgtacaaattcttggatatatgatataccagagctaaaatatcctcgttctaattgtgggggactggctgatgacgaatacatttattgtataggcggcatacgcgatcaggattcatcgttgacatctagtattgatagatggaagccatcaaaaccatattggcagaagtatgctaaaatgcgcgaaccaaaatgtgatatgggggttgcgatgttaaacggattaatatatgttataggtggaatcgttaaaggtgacacgtgtaccgacgcactagagagtttatcagaagatggatggatgaagcatcaacgtcttccaataaaaatgtccaatatgtcgacgattgttcatgatggcaagatttatatatctggaggttacaacaatagtagtgtagttaatgtaatatcgaatctagtccttagctataattcgatatatgatgaatggaccaaattatcatcattaaacattcctagaattaatcccgctctatggtcagcgcataataaattatatgtaggaggaggaatatctgatgatgttcgaactaatacatctgagacatacgacaaagaaaaagattgttggacattggataatggtcacgtgttaccacgcaattatataatgtataaatgcgaaccgattaaacataaatatccattggaaaaaacacagtacacgaatgattttctaaagtatttggaaagttttataggtagttgatagaacaaaatacataattttgtaaaaataaatcactttttatactaatatgacacgattaccaatacttttgttactaatatcattagtatactctacaccttctcctcagacatctaaaaaaataggtgatgatgcaactctatcatgtaatcgaaataatacaaatgactacgttgttatgagtgcttggtataaggagcccaattccattattcttttagctgctaaaagcgacgtcttgtattttgataattataccaaggataaaatatcttacgactctccatacgatgatctagttacaactatcacaattaaatcattgactgctagagatgccggtacttatgtatgtgcattctttatgacatcgcctacaaatgacactgataaagtagattatgaagaatactccacagagttgattgtaaatacagatagtgaatcgactatagacataatactatctggatctacacattcaccggaaactagttctgagaaacctgattatatagataattctaattgctcgtcggtattcgaaatcgcgactccggaaccaattactgataatgtagaagatcatacagacaccgtcacatacactagtgatagcattaatacagtaagtgcatcatctggagaatccacaacagacgagactccggaaccaattactgataaagaagatcatacagtcacagacactgtctcatacactacagtaagtacatcatctggaattgtcactactaaatcaaccaccgatgatacgtacaatgataatgatacagtaccaccaactactgtaggcggtagtacaacctctattagcaattataaaaccaaggactttgtagaaatatttggtattaccgcattaattatattgtcggccgtggcaatattctgtattacgtattatatatgtaataaacgttcacgtaaatacaaaacagagaacaaagtctagatttttgacttacataaatgtctgggatagtaaaatctatcatattgagcgggccatctggtttaggaaagacagccatagccaaaagactatgggaatatatttggatttgtggtgtcccataccactagatttcctcgtcctatggaacgagaaggtgtcgattaccattacgttaacagagaggccatctggaagggaatagccgccggaaactttctagaacatactgagtttttaggaaatatttacggaacttctaaaactgctgtgaatacagcggctattaataatcgtatttgtgtgatggatctaaacatcgatggcgttagaagtcttaaaaatacgtacctaatgccttactcggtgtatataagacctacctctcttaaaatggttgagaccaagcttcgttgtagaaacactgaagcggatgatgagattcatcgtcgtgtgatgttggcaaaaactgacatggatgaggcaggtgaagccggtctattcgacactattatcattgaagatgatgtgaatttagcatatagtaagttaattcagatactacaggaccgtattagaatgtattttaacactaattagagacttaagacttaaaacttgataattaataatataactcgtttttatatgtggctatttcaacgtctaatgtattagttaaatattaaaacttaccacgtaaaacttaaaatttaaaatgatatttcattgacagatagatcacacattatgaactttcaaggacttgtgttaactgacaattgcaaaaatcaatgggtcgttggaccattaataggaaaaggtggatttggtagtatttatactactaatgacaataattatgtagtaaaaatagagcccaaagctaacggatcattatttaccgaacaggcattttatactagagtacttaaaccatccgttatcgaagaatggaaaaaatctcacaatataaagcacgtaggtcttatcacgtgcaaggcatttggtctatacaaatccattaatgtggaatatcgattcttggtaattaatagattaggtgcagatctagatgcggtgatcagagccaataataatagactaccaaaaaggtcggtgatgttgatcggaatcgaaatcttaaataccatacaatttatgcacgagcaaggatattctcacggagatattaaagcgagtaatatagtcttggatcaaatagataagaataaattatatctagtggattacggattggtttctaaattcatgtctaacggcgaacatgttccatttataagaaatccaaataaaatggataacggtactctagaatttacacctatagattcgcataaaggatacgttgtatctagacgtggagatctagaaacacttggatattgtatgattagatggttgggaggtatcttgccatggactaagatatctgaaacaaagaattgtgcattagtaagtgccacaaaacagaaatatgttaacaatactgcgactttgttaatgaccagtttgcaatatgaacctagagaattgctgcaatatattaccatggtaaactctttgacatattttgaggaacccaattacgacgagtttcggcacatattaatgcagggtgtatattattaagtgtggtgtttggtcgataaaaattaaaaaataacttaatttattattgatctcgtgtgtacaaccgaaatcatggcgatgttttacgcacacgctctcggtgggtacgacgagaatcttcatgcctttcctggaatatcatcgactgttgccaatgatgtcaggaaatattctgttgtgtcagtttataataacaagtatgacattgtaaaagacaaatatatgtggtgttacagtcaggtgaacaagagatatattggagcactgctgcctatgtttgagtgcaatgaatatctacaaattggaaatccgatccatgatcaagaaggaaatcaaatctctatcatcacatatcgccacaaaaactactatgctctaagcggaatcgggtacgagagtctagacttgtgtttggaaggagtagggattcatcatcacgtacttgaaacaggaaacgctgtatatggaaaagttcaacatgattattctactatcaaagagaaggccaaagaaatgagtgcacttagtccaggacctatcatcgattaccacgtctggataggagattgtatctgtcaagttactgctgtggacgtacatggaaaggaaattatgaaaatgagattcaaaaagggtgcggtgcttccgatcccaaatctggtaaaagttaaacttggggagaatgatacagaaaatctttcttctactatatcggcggcaccatcgaggtaaccacctctctggaagacagcgtgaataatgtactcatgaaacgtttggaaactatacgccatatgtggtctgttgtatatgatcattttgatattgtgaatggtaaagaatgctgttatgtgcatacgcatttgtctaatcaaaatcttataccgagtactgtaaaaacaaatttgtacatgaagactatgggatcatgcattcaaatggattccatggaagctctagagtatcttagcgaactgaaggaatcaggtggatggagtcccagaccagaaatgcaggaatttgaatatccagatggagtggaagacactgaatcaattgagagattggtagaggagttcttcaatagatcagaacttcaggctggtgaatcagtcaaatttggtaattctattaatgttaaacatacatctgtttcagctaagcaactaagaacacgtatacggcagcagcttccttctatactctcatcttttaccaacacaaagggtggatatttgttcattggagttgataataatacacacaaagtatttggattcacggtgggttacgactacctcagactgatagagaatgatatagaaaagcatatcaaaagactttgtgttgtgtatttctgtgagaagaaagaggacatcaagtacgcgtgtcgattcatcaaggtatataaacctggggatgaggctacctcgacatacgtgtgcgctatcaaagtggaaagatgctgttgtgctgtgtttgcagattggccagaatcatggtatatggatactaatggtatcaagaagtattctccagatgaatgggtgtcacatataaaattttaattaatgtaactatagagaacaaataataaggttgtaatatcatatagacaataactaacaattaattagtaactgttatctcttttttaattaaccaactaactatatacctattaatacatcgtaattatagttcttaacatctattaatcattaattcgcttctttaattttttataaactaacattgttaattgaaaagggataacatgttacagaatataaattatatatggatttttttaaaaaggaaatacttgactggagtatatatttatctcttcattatatagcacgcgtgttttccaatttttccacatcccatataatacaggattataatctcgttcgaacatacgagaaagtggataaaacaatagttgattttttatctaggttgccaaatttattccatattttagaatatggggaaaatattctacatatttattctatggatgatgctaatacgaatattataattttttttctagatagagtattaaatattaataagaacgggtcatttatacacaatctcgggttatcatcatccattaatataaaagaatatgtatatcaattagttaataatgatcatccagataataggataagactaatgcttgaaaatggacgtagaacaagacattttttgtcctatatatcagatacagttaatatctatatatgtattttaataaatcatggattttatatagatgccgaagacagttacggttgtacattattacatagatgtatatatcactataagaaatcagaatcagaatcatacaatgaattaattaagatattgttaaataatggatcagatgtagataaaaaagatacgtacggaaacacaccttttatcctattatgtaaacacgatatcaacaacgtggaattgtttgagatatgtttagagaatgctaatatagactctgtagactttaatagatatacacctcttcattatgtctcatgtcgtaataaatatgattttgtaaagttattaatttctaaaggagcaaatgttaatgcgcgtaataaattcggaactactccattttattgtggaattatacacggtatctcgcttataaaactatatttggaatcagacacagagttagaaatagataatgaacatatagttcgtcatttaataatttttgatgctgttgaatctttagattatctattatccagaggagttattgatattaactatcgtactatatacaacgaaacatctatttacgacgctgtcagttataatgcgtataatacgttggtctatctattaaacaaaaatggtgattttgagacgattactactagtggatgtacatgtatttcggaagcagtcgcaaacaacaacaaaataataatggaagtactattgtctaaacgaccatctttgaaaattatgatacagtctatgatagcaattactaaacataaacagcataatgcagatttattgaaaatgtgtataaaatatactgcgtgtatgaccgattatgatactcttatagatgtacagtcgctacagcaatataaatggtatattttaagatgtttcgatgaaatagatatcatgaagagatgttatataaaaaataaaactgtattccaattagttttttgtatcaaagacattaatactttaatgagatacggtaaacatccttctttcgtgaaatgcactagtctcgacgtatacggaagtcgtgtacgtaatatcatagcatctattagatatcgtcagagattaattagtctattatccaagaagctggatcctggagataaatggtcgtgttttcctaacgaaataaaatataaaatattggaaaactttaacgataacgaactatccacatatctaaaaatcttataaacattattaaaatataaaatctaagtaggataaaatcacactacatcattgtttccttttagtgctcgacagtgtatactatttttaacgctcataaataaaaatgaaaacgatttccgttgttacgttgttatgcgtactacctgctgttgtttattcaacatgtactgtacccactatgaataacgctaaattaacgtctaccgaaacatcgtttaatgataaccagaaagttacgtttacatgtgatcagggatatcattctttggatccaaatgctgtctgtgaaacagataaatggaaatacgaaaatccatgcaaaaaaatgtgcacagtttctgattatgtctctgaactatataataaaccgctatacgaagtgaattccaccatgacactaagttgcaacggcgaaacaaaatattttcgttgcgaagaaaaaaatggaaatacttcttggaatgatactgttacgtgtcctaatgcggaatgtcaacctcttcaattagaacacggatcgtgtcaaccagttaaagaaaaatactcatttggggaatatatgactatcaactgtgatgttggatatgaggttattggtgcttcgtacataagttgtacagctaattcttggaatgttattccatcatgtcaacaaaaatgtgatatgccgtctctatctaacggattaatttccggatctacattttctatcggtggcgttatacatcttagttgtaaaagtggttttacactaacggggtctccatcatccacatgtatcgacggtaaatggaatcccatactcccaatatgtgtacgaactaacgaaaaatttgatccagtggatgatggtcccgacgatgagacagatttgagcaaactctcgaaagacgttgtacaatatgaacaagaaatagaatcgttagaagcaacttatcatataatcatagtggcgttgacaattatgggcgtcatatttttaatctccgttatagtattagtttgttcctgtgacaaaaataatgaccaatataagttccataaattgctaccgtaaatataaatccgttaaaataattaataatttaataacaaacaagtatcaaaagattaaagacttatagctagaatcaattgagatgtcttcttcagtggatgttgatatctacgatgccgttagagcatttttactcaggcactattataacaagagatttattgtgtatggaagaagtaacgccatattacataatatatacaggctatttacaagatgcgccgttataccgttcgatgatatagtacgtactatgccaaatgaatcacgtgttaaacaatgggtgatggatacacttaatggtataatgatgaatgaacgcgatgtttctgtaagcgttggcaccggaatactattcatggaaatgtttttcgattacaataaaaatagtatcaacaatcaactaatgtatgatataattaatagcgtatctataattctagctaatgagagatatagaagcgcttttaacgacgatggtatatacatccgtagaaatatgattaacaagttgtacggatacgcatctctaactactattggcacgatcgctggaggtgtttgttattatctgttgatgcatctagttagtttgtataaataattatttcaatatactagttaaaattttaagattttaaatgtataaaaaactaataacgtttttatttgtaataggtgcattagcatcctattcgaataatgagtacactccgtttaataaactgagtgtaaaactctatatagatggagtagataatatagaaaattcatatactgatgataataatgaattggtgttaaattttaaagagtacacaatttctattattacagagtcatgcgacgtcggatttgattccatagatatagatgttataaacgactataaaattattgatatgtataccattgactcgtctactattcaacgcagaggtcacacgtgtagaatatctaccaaattatcatgccattatgataagtacccttatattcacaaatatgatggtgatgagcgacaatattctattactgcagagggaaaatgctataaaggaataaaatatgaaataagtatgatcaacgatgatactctattgagaaaacatactcttaaaattggatctacttatatatttgatcgtcatggacatagtaatacatattattcaaaatatgatttttaaaaatttaaaatatattatcacttcagtgacagtagtcaaataacaaacaacaccatgagatatattataattctcgcagttttgttcattaatagtatacatgctaaaataactagttataagtttgaatccgtcaattttgattccaaaattgaatggactggggatggtctatacaatatatcccttaaaaattatggcatcaagacgtggcaaacaatgtatacaaatgtaccagaaggaacatacgacatatccgcatttccaaagaatgatttcgtatctttctgggttaaatttgaacaaggcgattataaagtggaagagtattgtacgggactatgcgtcgaagtaaaaattggaccaccgactgtaacattgactgaatacgacgaccatatcaatttgtacatcgagcatccgtatgctactagaggtagcaaaaagattcctatttacaaacgcagtgacatgtgtgatatctacttgttgtatacggctaacttcacattcggagattctaaagaaccagtaccatatgatatcgatgactacgattgcacgtctacaggttgcagcatagactttgtcacaacagaaaaagtgtgcgtgacagcacagggagccacagaagggtttctcgaaaaaattactccatggagttcgaaagtatgtctgacacctaaaaagagtgtatatacatgcgcaattagatccaaagaagatgttcccaatttcaaggacaaaatggccagagttatcaagagaaaatttaatacacagtctcaatcttatttaactaaatttctcggtagcacatcaaatgatgttaccacttttcttagcatgcttaacttgactaaatattcataactaatttttattaatgaaataaaactgcatattatacactggttaacgcccttataggctctaaccattttcaagatgaggtccctgattatagtccttctgttcccctccatgtctattagacgatgtgagaagactgaagaggaaacatggggattgaaaatagggttgtgtataattgccaaagatttttatcccgaaagaactgattgcagtgttcatctcccaactgcaagtgaaggattcagggatatacgaaacaccgataaattataaaaaaagcaatgtgtccgctgtttccgttaataatactattttcgtaactggcggattattcataaataactctaatagcacgatcgtggttaacaatatggaaaacttgacatttataaagacaaacaatggtcgattatagaaatgcctatggctagggtatatcacggcatcgactcgacatttggaatgttatattttgccggaggtctatccgttaccgaacaatatggtaatttagagaaaaacaacgagatatcttgttacaatcctagaacgaataagtggtttgatatttcatatactatttataagatatccatatcatcattgtgtaaactaaataacgtcttctatgtatttagtaaggacattggatatgtggaaaagtatgatggtgcatggaagttagtacatgatcgtctccccgctataaaggcattatcaacttctccttattgattgaaaatataaatagtttttatgtatagcagtattaccctatagttttattgcttactactaacatggatacagatacagatacagatacagatacagatacagatacagatgttacaaatgtagaagatatcataaatgaaatagatagagagaaagaagaaatactaaaaaatgtagaaattgaaaataataaaaacattaacaagaatcatcccaatgaatatattagagaagcactcgttattaatacaagtagtaatagtgattccattgataaagaagttatagaatgtatctgtcacgatgtaggaatatagatcatatctactaatttttataatcgatacaaaacataaaaaacaactcgttattacatagcaggcatggaatccttcaagtattgttttgataacgatggcaagaaatggattatcggaaatactttatattctggtaattcaatactctataaggtcagaaaaaatttcactagttcgttctacaattacgtaatgaagatagatcacaaatcacacaagccattgttgtttgaaatacgattctatatatctgtattggatcctttgactatcgacaactggacacgggaacgtggtataaagtatttggctattccagatctgtatggaattggagaaaccgatgattatatgttcttcgttataaagaattcgggaagagtattcgccccaaaggatactgaatcagtcttcgaagcatgcgtcactatgataaacacgttagagtttatacactctcgaggatttacccatggaaaaatagaaccgaggaatatactgattagaaataaacgtctttcactaattgactattctagaactaacaaactatacaagagtggaaactcacatatagattacaacgaggacatgataacttcaggaaatatcaattatatgtgtgtagacaatcatcttggagcaacagtttcaagacgaggagatttagaaatgttgggatattgcatgatagaatggttcggtggcaaacttccatggaaaaacgaaagtagtataaaagtaataaaacaaaaaaaagaatataaaaaatttatagctactttctttgaggactgttttcctgaaggaaatgaacctctggaattagttagatatatagaattagtatacacgttagattattctcaaactcctaattatgacagactacgtaaactgtttatacaagattgaaattatattcttttttttatagagtgtggtagtgttacggatatctaatattaatattagactatctctatcgcgctacacgaccaatatcgattactatggatatcttctatgaaaggagagaatgtattcatttctccagcgtcaatctcgtcagtattgacaatactgtattatggagctaatggatccactgctgaacagctatcgaaatatgtagaaacggaggagaacacggataaggttagcgctcaaaatatctcattcaaatccataaataaagtatatgggcgatattctgccgtgtttaaagattcctttttgagaaaaattggcgataagtttcaaactgttgacttcactgattgtcgcactatagatgcaatcaacaagtgtgtagatatctttactgaggggaaaatcaatccactattggatgaaccattgtctcctagcaattagtgccgtatactttaaagcaaaatggttgacgccattcgaaaaggaatttaccagtgattatcccttttacgtatctccgacggaaatggtagacgtaagtatgatgtctatgtacggcaaggcatttaatcacgcatctgtaaaagaatcattcggcaacttttcaatcatagaactgccatatgttggagatactagtatgatggtcattcttccagacaagattgatggattagaatccatagaacaaaatctaacagatacaaattttaagaaatggtgtgactttatggatgctatgtttatagatgttcacattcccaagtttaaggtaacaggctcgtataatctggtggatactctagtaaagtcaggactgacagaggtgttcggttcaactggagattatagcaatatgtgtaatttagatgtgagtgtcgacgctatgatccacaaaacgtatatagatgtcaatgaagagtatacagaagcagctgcagcaacttctgtactagtggcagactgtgcatcaacaattacaaatgagttctgtgcagatcatccgttcatctatgtgattaggcatgttgatggaaaaattcttttcgttggtagatattgctctccgacaactaattgttaaccattttttttaaaaaaaatagaaaaaacatgtggtattagtgcaggtcgttgttcttccaattgcaattggtaagatgacggccaactttagtacccacgtcttttcaccacagcactgtggatgtgacagactgaccagtattgatgacgtcaaacaatgtttgactgaatatatttattggtcgtcctatgcataccgcaacaggcaatgcgctggacaattgtattccacactcctctcttttagagatgatgcggaattagtgttcatcgacattcgcgagctggtaaaaaatatgccgtgggatgatgtcaaagattgtacagaaatcatccgttgttatataccggatgagcaaaaaaccatcagagagatttcggccatcatcggactttgtgcatatgctgctacttactggggaggtgaagaccatcccactagtaacagtctgaacgcattgtttgtgatgcttgagatgctcaattacgtggattataacatcatattccggcgtatgaattgatgagttgtacatcttgacattttctttcttctcttctccctttcttctcttctccctttcttctcttctcccttcctccctcttctccctttcccagaaacaaacttttttacccactataaaataaaatgagtatactacctattatatttcttcctatatttttttattcttcattcgttcagacttttaacgcgcctgaatgtatcgacaaagggcaatattttgcatcattcatggagttagaaaacgagccagtaatcttaccatgtcctcaaataaatacgctatcatccggatataatatattagatattttatgggaaaaacgaggagcggataataatagaattataccgatagataatggtagcaatatgctaattctgaacccgacacaatcagactctggtatttatatatgcattaccacgaacgaaacctactgtgacatgatgtcgttaaatttgacaatcgtgtctgtctcagaatcaaatatagatcttatctcgtatccacaaatagtaaatgagagatctactggcgaaatggtatgtcccaatattaatgcatttattgctagtaacgtaaacgcagatattatatggagcggacatcgacgccttagaaataagagacttaaacaacggacacctggaattattaccatagaagatgttagaaaaaatgatgctggttattatacatgtgttttagaatatatatacggtggcaaaacatataacgtaaccagaattgtaaaattagaggtacgggataaaataataccttctactatgcaattaccagatggcattgtaacttcaataggtagtaatttgactattgcatgcagagtatcgttgagacctcccacaacggatgcagacgtcttttggataagtaatggtatgtattacgaagaagatgatggggacggagacggtagaataagtgtagcaaataaaatctatatgaccgataagagacgtgttattacatcccggttaaacattaatcctgtcaaggaagaagatgctacaacgtttacgtgtatggcgtttactattcctagcatcagcaaaacagttactgttagtataacgtgaatgtatgttgttacatttccatgtcaattgagtttataagaatttttatacattatcttccaacaaacaattgacgaacgtattgctatgattaactcccacgatactatgcatattattaatcattaacttgcagactatacctagtgctattttgacatactcatgttcttgtgtaattgcagtatctatattattaaagtacgtaaatctagctatagttttattatttaattttagataatataccgtctccttatttttaaaaattgccacatcctttattaaatcatgaatgggaatttctatgtcatcgttagtatattgtgaacaacaagagcagatatctataggaaagggtggaatgcgatacattgatctatgtagttttaaaacacacgcgaactttgaagaatttatataaatcattccatcgatacatccttctatgttgagatgtatatatccaggaattcttttattaatgtcgggaaatgtataaactaaaacattgcccgaaagcggtgcctctatctgcgttatatccgttcttaacttacaaaatgtaaccaatacctttgcatgacttgttttgttcggcaacgttagtttaaacttgacgaatggattaattacaatagcatgatccgcgcatctattaagtttttttactttaacgcccttgtatgtttttacagagactttatctaaatttctagtgcttgtatgtgttataaatataacgggatatagaaccgaatcacctaccttagatacccaattacattttatcagatccagataataaacaaattttgtcgccctaactaattctatattgttatatattttacaattggttatgatatcatgtaataacttggagtctaacgcgcatcgtcgtacgtttatacaattgtgatttagtgtagtatatctacacatgtatttttccgcactatagtattctggactagtgataaaactatcgttatatctgtcttcaatgaactcatcgagatattgctctctgtcatattcatacacctgcataaactttctagacatcttacaatccgtgttattttaggatcatatttacatatttacgggtatatcaaagatgttagattagttaatgggaatcgtctataataatgaatattaaacaattatatgaggacttttaccacaaagcatcataaaaatgagtcgtcgtctgatttatgttttaaatatcaaccgcgaatcaactcataaaatacaagagaatgaaatatatacatattttagtcattgcaatatagaccatacttctacagaacttgattttgtagttaaaaactatgatctaaacagacgacaacctgtaactgggtatactgcactacactgctatttgtataataattactttacaaacgatgtactgaagatattattaaatcatgacgtaaatgtaacgatgaaaaccagtagcggacgtatgcctgtttatatattgcttactagatgttgtaatatttcacatgatgtagtgatagatatgatagacaaagataaaaaccacttattacatagagactattccaacctattactagagtatataaaatctcgttacatgttattaaaggaagaggatatcgatgagaacatagtatccactttattagataagggaatcgatcctaactttaaacaagacggatatacagcgttacattattattatttgtgtctcgcacacgtttataaaccaggtgagtgtagaaaaccgataacgataaaaaaggccaagcgaattatttctttgtttatacaacatggagctaatctaaacgcgttagataattgtggtaatacaccattccatttgtatcttagtattgaaatgtgtaataatattcatatgactaaaatgctgttgacttttaatccgaatttcgaaatatgtaataatcatggattaacgcctatactatgttatataacttccgactacatacaacacgatattcttgttatgttaatacatcactatgaaacaaatgttggagaaatgccgatagatgagcgtcgtatgatcgtattcgagtttatcaaaacatattctacacgtccggcagattcgataacttatttgatgaataggtttaaaaatataaatatttatacccgctatgaaggaaagacattattacacgtagcatgtgaatataataatacacacgtaatagattatcttatacgtatcaacggagatataaatgcgttaaccgacaataacaaacacgctacacaactcattatagataacaaagaaaattccccatataccattaattgtttactgtatatacttagatatattgtagataagaatgtgataagatcgttggtggatcaacttccatctctacctatctttcgtcgcttatcatactagtcatatcctaaatgttgatcatattccaccaaatgattgtgaaagagattgagattaaatcgtctaacaaacaattagtttttatgacattaacatataataaataaattaatcattattgacttaacgatgacgaaagttatcatcatcttaggattcttgattattaatacaaattcattgtctatgaaatgtgaacaaggtgtctcatattataattcacaagaattaaagtgttgtaaactatgtaagccaggaacatattcagatcatcgatgtgataaatacagcgataccatttgtggacattgtccgagtgacacattcacgtcaatatataatcgttctccttggtgtcatagttgtagaggtccatgtggtactaatcgagtagaggtcacaccttgtacacctaccacaaatagaatctgtcattgtgactcgaatagttattgtctccttaaagcttctgatggtaactgtgttacatgtgctcctaaaacaaaatgtggtcgtgggtatggaaagaaaggagaagatgaaatgggtaataccatttgtaagaaatgtcggaagggtacttattcagatattgtatctgactctgatcaatgtaaaccaatgacaagataagacttactcgcatctactggatagacataaaatatcctcctcgtaataatgaaatataaatatacactaattattaatatcaataacaatcgagtattaatatataggtcatttttaaatcccttttgggttccgtcccaaacggcgtttcggtctgcgtcgccgccatggccatgccgagcctctccgcgtgctcctccatcgaggacgacttcaactatggcagctcggtggcgtctgccagcgtgcacatacgaatggcatttctaagaaaagtctacggtatcctttgtctacaatttcttttaacaacggcaacaactgcagtatttttatactttgactgcatgcggacatttatacaagggagtcctgttctaatattggcatcaatgttcggatctataggcttgattttcgcattgactttacacagacataaacatcccctgaatctgtacctgctttgtggatttacactgtcggaatctctaacgctggcctctgttgttactttctatgatgtgcatgtcgttatgcaagctttcatgctgactactgcagcgtttcttgctctgactacatatactctacaatcaaagagagatttcagtaaacttggagcaggattgtttgctgctttgtggattttaattttgtcaggactcttggggatatttgtgcaaaatgagacagtggagctggtcctgtctgcttttggggcccttgtattctgtggattcattatctatgacacgcactcactaatacataagctctcgcctgaagagtatgtgttagcctctatcaatctctacttggatatcatcaatctgttcttgcatctgttgcagcttttggaagtatctaataagaaataaagtttaaaatagaattaataaaaacatataggtcattttttaaacatggattggaaaccaaggtagttagttaatacacacaagatatatttttttcacatcatccacccatgggtaacaccaaggttgttagttaataatatacaagatattttttctcactctgatccatgtaaaccaaggacgagataagacactctcattcctcatccacaacccattaaaaaaatggaaattaaagccctctattagcataaacggctacaggtctacctttacaatggcctctccttgtgcccagttcagaccctgtcattgccacgctactaaggactccctgaataccgtggccgacgtcagacattgtctgactgaatacatcctgtgggtttctcatagatggacccatagagaaagcgcagggtctctctacaggcttctcatctctttcagaactgatgcaacggagctctttggtggtgagttgaaggattcacttccgtgggacaattgcgtggagatcattaaatgtttcatcagaaatgactccatgaaaaccgccgaagaacttcgtgcaatcattggactttgtactcaatcagctatcgtctctggaagagtcttcaacgataagtatatcgacatactacttatgctgcgaaagattctgaacgagaacgactatctcaccctcttggatcatatccgcactgctaaatactaaatctccttcatgctctctcactacactttttatcatcttatgaggaatgattgccttcgtgaaataggaataattagcaccagaatagctatggattattgtggtagagagtgcactattctatgtcgtctactggatgaagatgtgacgtacaaaaaaataaaactagaaattgaaacgtgtcacaacttatcaaaacatatagatagacgaggaaacaatgcgctacattgttacgtctccaataaatgcgatacagacattaagattgttctctcgcggagtcgagagactttgtagaaacaacgaaggattaactccgctaggagtatacagtaagcatagatacgtcaaatctcaaattgtgcatctactgatatccagctattcgaattcctctaacgaactcaagtcgaatataaatgatttcgatctgtattcggataatatcgacttacgtctgctaaaatacctaattgtggataaacggatacgtccgtccaagaatacgaattatgcaatcaatggtctcggattggtggatatatacgtaacgacgcctaatccgagaccagaagtattgctatggcttcttaaatcagaatgttacagcaccggttacgtatttcgtacctgtatgtacgacagtgatatgtgtaagaactctcttcattactatatatcgtctcatagagaatctcaatctctatccaaggatgtaattaaatgtttgatcgataacaatgtttccatccatggcagagacgaaggaggatctttacccatccaatactactggtctttctcaaccatagatatagagattgttaaattattattaataaaggatgtggacacgtgtagagtatacgacgtcagccctatattagaggcgtattatctaaacaagcgatttagagtaaccccatataatgtagacatggaaatcgttaatcttcttattgagagacgtcatactcttgtcgacgtaatgcgtagtattacttcgtacgattccagagaatataaccactacatcatcgataacattctaaagagatttagacaacaggatgtacaagccatactgataaactacttacattacggcgatatggtcgttcgatgcatgttggataacggagcaaccatggataagacgacggacaacaactatcctctacacgactactttgttaataataatctcgtcgatgtaaacgtcgtaaggtttatcgtggaaaatatggacacgcggctgtaaatcacgtatcgaacaatggccgtctatgtatgtacggtctgatattatcgagatttaataattgcgggtatcactgttatgaaaccatactgatagatgtatttgatatactaagcaagtacatggatgatatagatatgatcgataactctactatattacgcggtcgatgtcaataatatacaatttgcaaagcggttattggaatatggagcgagtgtcacgctcgataatcaatacggccatccagaaaagcagttaccaaagagaaaacaaaacgaagctagttgatttattactgagttaccatcccactctagagactatgattgacgcatttaatagagatatacgctatctatatcctgaaccattattcgcctgtatcagatacgccttaatcctagatgatgattttccttctaaagtaaagtatgatatcgccggtcgtcataaggaactaaagcgctatagagtagacattaatagaatgaagaatgtctacatatcaggcgtttccatgtttgatatattatttaaacgaagcaaacgccacagattgagatacgcaaagaatccgacatcaaatggtacaaaaaagaactaacgtccatcattacagaaactgtaaagaacaatgagaggatcgactccatagtggacaacattaatacagacgataacttgatttcgaaattacccatggagatactttattactccattaaataatttatcatggagcgataatgtcctgtttcatttgtttccatgacatattacaaaatcgattccgtccaagatgataaaaacatttaccggcatcataaacacggagtttattttatatgtctcgcataaacattactaaaaaaatatattgttcggtttttctttcacatctttaattatgaaaaagtaaatcattatgagatggacgagattgtacgcatcgttcgcgacagtatgtggtacatacctaacgtatttatggacgacggtaagaatgaaggtcacgtttctgtcaacaatgtctgtcatatgtattttacgttctttgatgtagatacatcgtctcatctgtttaagctagttattaaacactgcgatctgaataaacgaggtaactctccattacattgctatacgatgaatacacgatttaatccatctgtattaaagatattgttacaccacggcatgcgtaactttgatagcaaggatgaccactatcaatcgataacaagatctttgatatactaacggacaccattgatgactttagtaaatcatccgatctattgctgtgttatcttagatataaattcaatgggagcttaaactattacgttctgtacaaaggatccgaccctaattgcgccgacgaggatgaactcacttctcttcattactactgtaaacacatatccacgttctacgaaagcaattattacaagtcaagtcacactaagatgcgagccgagaagcgattcatctacgcgataatagattatggagcaaacattaacgcggttacacacttaccttcaacagtataccaaacatagtcctcgtgtggtgtatgctcttttatctcgaggagccgatacgaggatacgtaataatcttgattgtacacccatcatggaacgattgtgcaacaggtcatattctcataatgttactcaattggcacgaacaaaaggaagaaggacaacatctactttatctattcataaaacataatcaaggatacactctcaatatactacggtatctattagataggttcgacattcagaaagacgaatactataataccgcctttcaaaattgtaacaacaatgttgcctcatacatcggatacgacatcaaccttccgactaaagacggtattcgacttggtgtttgaaaacagaaacatcatatacaaggcggatgttgtgaatgacatcatccaccacagactgaaagtatctctacctatgattaaatcgttgttctacaagatgtctctccctacgacgattactacgtaaaaaagatactagcctactgcctattaagggacgagtcattcgcggaactacatagtaaattctgtttaaacgaggactataaaagtgtatttatgaaaaatatatcattcgataagatagattccatcatcgtgacataagtcgcctcaaagagattcgaatctccgacaccgacctgtatacggtatcacagctatcttaaagccatacattcagacagtcacatttcatttcccatgtacgacgatctcatagaacagtgccatctatcgatggagcgtaaaagtaaactcgtcgacaaagcactcaataaattagagtctaccatcggtcaatctagactatcgtatttgcctccggaaattatgcgcaatatcatctaaacagtatgttgtacggaaagaaccattacaaatattatccatgatagaaagaaaatatctatatgattggagaagtaggaaacaggaacaagacaacgattactacattattaaatcatgaagtccgtattatactcgtatatattgtttctctcatgtataataataaacggaagagatatagcaccgcatgcaccatccgatggaaagtgtaaagacaacgaatacaaacgccataatttgtgtccgggaacatacgcttccagattatgcgatagcaagactaacacacaatgtacgccgtgtggttcgggtaccttcacatctcgcaataatcatttacccgcttgtctaagttgtaacggaagacgcgatcgtgtaacacgactcacaatagaatctgtgaatgctctcccggatattattgtcttctcaaaggatcatccggatgcaaggcatgtgtttcccaaacaaaatgtggaataggatacggagtatccggagacgtcatctgttctccgtgtggtctcggaacatattctcacaccgtctcttccgcagataaatgcgaacccgtacccagaaatacgtttaactatatcgatgtggaaattaacctgtatccagttaacgacacgtcgtgtactcggacgaccactaccggtctcagcgaatccatctcaacgtcggaactaactattactatgaatcataaagactgtaatcccgtctttcgtgatggatacttctccgttcttaataaggtagcgacttcaggtttctttacaggagaaaggtgtgcactctgaatttcgagattaaatgcaataacaaagattcttcctccaaacagttaacgaaagcaaagaatgatactatcatgccgcattcggagacagtaactctagtgggcgacatctatatactatatagtaataccaatactcaagactacgaaactgatacaatctcttatcatgtgggtaatgttctcgatgtcgatagccatatgcccggtagttgcgatatacataaactgatcactaattccaaacccacccactttttatagtaagtttttcacccataaataataaatacaataattaatttctcgtaaaagtagaaaatatattctaatttattgcacggtaaggaagtagaatcataaagaacagtactcaatcaatagcaattatgaaacaatatatcgtcctggcatgcatgtgcctggcggcagctgctatgcctgccagtcttcagcaatcatcctcatcctcctcctcgtgtacggaagaagaaaacaaacatcatatgggaatcgatgttattatcaaagtcacaaagcaagaccaaacaccgaccaatgataagatttgccaatccgtaacggaaattacagagtccgagtcagatccagatcccgaggtggaatcagaagatgattccacatcagtcgaggatgtagatcctcctaccacttattactccatcatcggtggaggtctgagaatgaactttggattcaccaaatgtcctcagattaaatccatctcagaatccgctgatggaaacacagtgaatgctagattgtccagcgtgtccccaggacaaggtaaggactctcccgcgatcactcatgaagaagctcttgctatgatcaaagactgtgaagtgtctatcgacatcagatgtagcgaagaagagaaagacagcgacatcaagacccatccagtactcgggtctaacatctctcataagaaagtgagttacgaagatatcatcggttcaacgatcgtcgatacaaaatgcgtcaagaatctagagtttagcgttcgtatcggagacatgtgcaaggaatcatctgaacttgaggtcaaggatggattcaagtatgtcgacggatcggcatctgaaggtgcaaccgatgatacttcactcatcgattcaacaaaactcaaagcgtgtgtctgaatcgataactctattcatctgaaattggatgagtagggttaatcgaacgattcaggcacaccacgaattaaaaaagtgtaccggacactatattccggtttgcaaaacaaaaatgttcttaactacattcacaaaaagttacctctcgcgacttcttctttttctgtctcaatagtgtgatacgattatgacactattcctattcctattcctatttcctttcagagtatcacaaaaatattaaacctctttctgatggtctcataaaaaaagttttacaaaaatatttttattctctttctctctttgatggtctcataaaaaaagttttacaaaaatatttttattctctttctctctttgatggtctcataaaaaaagttttacaaaaatatttttattctctttctctctttgatggtctcataaaaaaagttttacaaaaatatttttattctctttctctctttgatggtctcataaaaaaagttttacaaaaatatttttattctctttctctctttgatggtctcataaaaaaagttttacaaaaatatttttattctctttctctctttgatggtctcataaaaaaagttttacaaaaatatttttattctctttctctctttgatggtctcataaaaaaagttttacaaaaatatttttattctctttctctctttgatggtctcataaaaaaagttttacaaaaatatttttattctctttctctctttgatggtctcataaaaaaagttttacaaaaatatttttattctctttctctctttgatggtctcataaaaaaagttttacaaaaatatttttattctctttctctctttgatggtctcataaaaaaagttttacaaaaatatttttattctctttctctctttga

SEQ ID NO: 7 - DNA, 188082 bp, Artificial Sequence
  LIVP 7.1.1
atttttgtaaaactttttttatgagaccatcaaagagagaaagagaataaaaatatttttgtaaaactttttttatgagaccatcaaagagagaaagagaataaaaatatttttgtaaaactttttttatgagaccatcaaagagagaaagagaataaaaatatttttgtaaaactttttttatgagaccatcaaagagagaaagagaataaaaatatttttgtaaaactttttttatgagaccatcaaagagagaaagagaataaaaatatttttgtaaaactttttttatgagaccatcaaagagagaaagagaataaaaatatttttgtaaaactttttttatgagaccatcaaagagagaaagagaataaaaatatttttgtaaaactttttttatgagaccatcaaagagagaaagagaataaaaatatttttgtaaaactttttttatgagaccatcaaagagagaaagagaataaaaatatttttgtaaaactttttttatgagaccatcaaagagagaaagagaataaaaatatttttgtaaaactttttttatgagaccatcaaagagagaaagagaataaaaatatttttgtaaaactttttttatgagaccatcaaagagagaaagagaataaaaatatttttgtaaaactttttttatgagaccatcaaagagagaaagagaataaaaatatttttgtaaaactttttttatgagaccatcagaaagaggtttaatatttttgtgataccctgaaaggaaataggaataggaataggaataggaatagtgtcataatcgtatcacactattgagacagaaaaagaagaagtcgcgagaggtaactttttgtgaatgtagttaagaacatttttgttttgcaaaccggaatatagtgtccggtacacttttttaattcgtggtgtgcctgaatcgttcgattaaccctactcatccaatttcagatgaatagagttatcgattcagacacacgctttgagttttgttgaatcgatgagtgaagtatcatcggttgcaccttcagatgccgatccgtcgacatacttgaatccatccttgacctcaagttcagatgattccttgcacatgtctccgatacgaacgctaaactctagattcttgacacattttgtatcgacgatcgttgaaccgatgatatcttcgtaactcactttcttatgagagatgttagacccgagtactggatgggtcttgatgtcgctgtctttctcttcttcgctacatctgatgtcgatagacacctcacagtctttgatcatagcaagagcttcttcacgagtgatcgcgggagagtccttaccttgtcctggggacacgctggacaatctagcattcactgtgtttccatcagcggattctgagatggatttaatctgaggacatttggtgaatccaaagttcattctcagacctccaccgatgatggagtaataagtggtaggaggatctacatcctcgactgatgtggaatcatcttctgattccacctcgggatctggatctgactcggactctgtaatttccgttacggattggcaaatcttatcattggtcggtgtttggtcttgctttgtgactttgataataacatcgattcccatatgatgtttgttttcttcttccgtacacgaggaggaggatgaggatgattgctgaagactggcaggcatagcagctgccgccaggcacatgcatgccaggacgatatattgtttcataattgctattgattgagtactgttctttatgattctacttccttaccgcgcaataaattagaatatattttctacttttacgagaaattaattattgtatttattatttatgggtgaaaaacttactataaaaagtgggtgggtttggaattagtgatcagtttatgtatatcgcaactaccgggcatatggctatcgacatcgagaacattacccacatgataagagattgtatcagtttcgtagtcttgagtattggtattactatatagtatatagatgtcgcccactagagttactgtctccgaatgcggcatgatagtatcattctttgctttcgttaactgtttggaggaagaatctttgttattgcatttaatctcgaaattcagagtgcacacctttctcctgtaaagaatcctgaagttgctaccttattaagaacggagaagtatccatcacgaaatacgggattacagtctttatgattcatagtaatagttagttccgacgttgagatggattcgctgagaccggtagtggtcgtccgagtacacgacgtgtcgttgacgggatacagattaatttccacatcgatatagttaaacgtattactgggtacgggttcgcatttatctgcggaagagacggtgtgagaatatgttccgagaccacacggagaacagatgacgtctccggatactccgtatcctattccacattttgtttgggaaacacatgccttgcatccggatgatcctttgagaagacaataatatccgggagagcattcacagattctattgtgagtcgtgttacacgatcgcgtcttccgttacaacttagacaagcgggtaaatgattattgcgagatgtgaaggtacccgaaccacacggcgtacatcgtgtgttagtcttgctatcgcataatctggaagcgtatgttcccggacacaaattatggcgtttgtattcgttgtctttacactttccatcggatggtgcatgcggtgctatatctcttccgtttattattatacatgagagaaacaatatatacgagtataatacggacttcatgatttaataatgtagtaatcgttgtcttgttcctgtttcctacttctccaatcatatagatattttctttctatcatggataatatttgtaatggttctttccgtacaacatactgtttagatgatattgcgcataatttccggaggcaaatacgatagtctagattgaccgatggtagactctaatttattgagtgctttgtcgacgagtttacttttacgctccatcgatagatggcactgttctatgagatcgtcgtacatgggaaatgaaatgtgactgtctgaatgtatggctttaagatagctgtgataccgtatacaggtcggtgtcggagattcgaatctctttgaggcgacttatgtcacgatgatggaatctatcttatcgaatgatatatttttcataaatacacttttatagtcctcgtttaaacagaatttactatgtagttccgcgaatgactcgtcccttaataggcagtaggctagtatcttttttacgtagtaatcgtcgtagggagagacatcttgtagaacaacgatttaatcataggtagagatactttcagtctgtggtggatgatgtcattcacaacatccgccttgtatatgatgtttctgttttcaaacaccaagtcgaataccgtctttagtcggaaggttgatgtcgtatccgatgtatgaggcaacattgttgttacaattttgaaaggcggtattatagtattcgtctttctgaatgtcgaacctatctaatagataccgtagtatattgagagtgtatccttgattatgttttatgaatagataaagtagatgttgtccttcttccttttgttcgtgccaattgagtaacattatgagaatatgacctgttgcacaatcgttccatgatgggtgtacaatcaagattattacgtatcctcgtatcggctcctcgagataaaagagcatacaccacacgaggactatgtttggtatactgttgaaggtaagtgtgtaaccgcgttaatgtttgctccataatctattatcgcgtagatgaatcgcttctcggctcgcatcttagtgtgacttaacttgtaataattgctttcgtagaacgtggatatgtgtttacagtagtaatgaagagaagtgagttcatcctcgtcggcgcaattagggtcggatcctttgtacagaacgtaatagtttaagctcccattgaatttatatctaagataacacagcaatagatcggatgatttactaaagtcatcaatggtgtccgttagtatatcaaagatcttgttatcgattgatagtggtcatccttgctatcaaagttacgcatgccgtggtgtaacaatatctttaatacagatggattaaatcgtgtattcatcgtatagcaatgtaatggagagttacctcgtttattcagatcgcagtgtttaataactagcttaaacagatgagacgatgtatccacatcaaagaacgtaaaatacatatgacagacattgttgacagaaacgtgaccttcattcttaccgtcgtccataaatacgttaggtatgtaccacatactgtcgcgaacgatgcgtacaatctcgtccatctcataatgatttactttttcataattaaagatgtgaaagaaaaccgaacaatatatttttttagtaatgtttatgcgagacatataaaataaactccgtgtttatgatgccggtaaatgtttttatcatcttggacggaatcgattttgtaatatgtcatggaaacaaatgaaacaggacattatcgctccatgataaattatttaatggagtaataaagtatctccatgggtaatttcgaaatcaagttatcgtctgtattaatgttgtccactatggagtcgatcctctcattgttctttacagtttctgtaatgatggacgttagttcttttttgtaccatttgatgtcggattctttgcgtatctcaatttgtggcgtttgcttcgtttaaataatatatcaaacatggagacgcctgatatgtagacattcttcattctattaatgtctactctatagcgctttagttccttatgacgaccggcgatatcatactttactttagaaggaaaatcatcatctaggattaaggcgtatctgatacaggcgaataatggttcaggatatagatagcgtatatctctattaaatgcgtcaatcatagtctctagagtgggatggtaactcagtaataaatcaactagcttcgttttgttttctctttggtaactgcttttctggatggccgtattgattatcgagcgtgacactcgctccatattccaataaccgctttgcaaattgtatattattgacatcgaccgcgtaatatagtagagttatcgatcatatctatatcatccatgtacttgcttagtatatcaaatacatctatcagtatggtttcataacagtgatacccgcaattattaaatctcgataatatcagaccgtacatacatagacggccattgttcgatacgtgatttacagccgcgtgtccatattttccacgataaaccttacgacgtttacatcgacgagattattattaacaaagtagtcgtgcagaggatagttgttgtccgttatctaacatgcatcgaacgaccatatcgccgtaatgtaagtagtttatcaacatggcttgtacatcctgttgtctaaatctctttagaatgttatcgatgatgtagtggttatattctctggaatcgtacgaagtaatactacgcattacgtcgacaagagtatgacgtctctcaataagaagattaacgatttccatgtctacattatatggggttactctaaatcgcttgtttagataatacgcctctaatatagggctgacgtcgtatactctacacgtgtccacatcctttattaataataatttaacaatctctatatctatggttgagaaagaccagtagtattggatgggtaaagatcctccttcgtctctgccatggatggaaacattgttatcgatcaaacatttaattacatccttggatagagattgagattctctatgagacgatatatagtaatgaagagagttcttacacatatcactgtcgtacatacaggtacgaaatacgtaaccggtgctgtaacattctgatttaagaagccatagcaatacttctggtctctcgttacgtatatatccaccaatccgagaccattgattgcataattcgtattcttggacggacgtatccgtttatccacaattaggtattttagcagacgtaagtcgatattatccgaatacagatcgaaatcatttatattcgacttgagttcgttagaggaatttgaatagctggatatcagtagatgcacaatctgagattttacgtatctatgcttactgtatactcctagcggagttaatccttcgttgtttctacaaagtctctcgactccgcgagagaacaatcttaatgtctgtatcgcatttattggagacgtaacaatgtagcgcattgtttcctcgtctatctatatgttttgataagttgtgacacgtttcaatttctagttttatttttttgtacgtcacatcttcatccagtagacgacatagaatagtgcactctctaccacaataatccatagctattctggtgctaattattcctatttcacgaaggcaatcattcctcataagatgataaaaagtgtagtggagatttagtatttagcagtgcggatatgatccaagagggtgagatagtcgttctcgttcagaatctttcgcagcataagtagtatgtcgatatacttatcgttgaagactctttataaaagtctatttgtttatatttattgcggatagcagtatttccctataaaaagtatacgtcctgtggtgtctttaatcatgtacatgaatggatggtttatgtagaccttcgtacgatataccatcgaaaagttaatcgtaaatactcctgtaacggccgatgcttctgtatactcctcattaacatctataaacgtcgtatgtagaaatttttctacagtgatagtttcattacacatcttgctaaaatctgcataatatccgaatatattagtaagtcctaaattttctaaaatcggtaccagattatacggttctgtcatttccactttaaactttggcatatacaagtctatacttttagtagataacataccacaccattttttaaatttttcatctgttatatttttttctatgttatatataccttctatgtcgtccggtagtataatcaccatactagagtttccctcgtatggaatatcgataatagagaatcctccgaataattcattaatatgtacatattgcaagttattctcggtacccaccatcatatcaacgctggtaactatattcttagaaatataaaacttgtctgtatatgtaagatgtttagaaaatggatatttccacattgctttaaaatggacggcgctaacaactgtcatacgagtattaatggatagcggactagtcaataaggaattaattttaccatttgtcattgtcttaacccattcgttgattagttcctttgtttggttagcattattaaagtttacagtttgaaaatcgtcttttattttttgtaggaaggaggcgtggaactcgatactatcgctaccgtatattttatttgcggtagctagtgtcgcacaatacggaatatctacctccatgtcatcattattgtcatcgggtgtattctcattcatattctctatatattttgatagttgttcagctgtagaaccagctgctccatgatttagaatagataaagtagataaaatggaaactggagaaatcaaaacattttcatcagggtgttttaagattagttctttaaagatatccatggtatagacctaacgataacgatatatatcataaataaataatgttaaatttcaatttatgtttgtaccccgtattcatacttaacaaattggtattgcgtacacaatcaatcatattacataccattaataatgcaagcataaaaaattgttagtagatgtttctaaatataggttccgtaagcaaagaatataagaatgaagcggtaatgataaaatcaatcgttatctaaaatgatcatactcatttattttattctattatattaacacatacatttttaacagcaacacattcaatattgtattgttatttttatattatttacacaattaacaatatattattagtttatattactgaattaataatataaaattcccaatcttgtcataaacacacactgagaaacagcataaacacagaatccatcaaaaatgttgataaattatctgatgttgttgttcgctgctatgataatcagatcattcgccgatagtggtaacgctatcgaaacgacattgccagaaattacaaacgctacaacagatattccagctatcagattatgcggtccagagggagatggatattgtttacacggtgactgtatccacgctagagatattgacggtatgtattgtagatgctctcatggttatacaggcattagatgtcagcatgtagtattagtagactatcaacgttcagaaaacccaaacactacaacgtcatatatcccatctcccggtattatgcttgtattagtaggcattattatgtgttgtctattatctgtttataggttcactcgacgaactaaactacctatacaagatatggttgtgccataatttttataaatttttttatgagtatttttacaaaaatgtataaagtgtatgtcttatgtatatttataaaaatgctaagtatgcgatgtatctatgttatttgtatttatctaaacaatacctctacctctagatattatacaaaaattttttatttcggcatattaaagtaaaatctagttaccttgaaaatgaatacagtgggtggttccgtatcaccagtaagaacataatagtcaaatacagtatccgattgagattttgcatacaatactagtctagaaagaaatttgtaatcatcttctgtgacgggagtccatatatctgtatcatcgtctagtttatcagtgtcccatgctatattcctgttatcatcattagttaatgaaaataactctcgtgcttcagaaaagtcaaatattgtatccatacatacatctccaaaactatcgcttatacgtttatctttaacgatacctatacctagatggttatttactaacagacattttccagatctattgactataactcctatagtttccacatcaaccaagtaatgatcatctattgttatataacaataacataactcttttccatttttatcagtatgtatatctatatcaacgtcgtcgttgtagtgaatagtagtcattgatctattatatgaaacggatatgtctagaacggcaattgttttacgtccagttaacactttcgttgatttaaagtctagagtctttgcaaacataatatccttatccgactttatatttcctgtagggtggtataattttattttgcctccacatatcggtgtttccaaatatattactagacaatattccatatagttattagttaagggtacccaattagaacacgtacgcttattatcatcatttggatcgtatttcataaaagttattgtgttatcgatgtcaacacattctacattttttaatcgtctatatagtatttttctgatattttctataatatcagaattgtcttccatcggaagttgtatactatcggaatcagttacatgtttaaataattctctgatgtcattccttatacaatcaaattcattattaaacagtttaatagtctgtagacctttatcgtcgtaaatatccattgtcttattagttacgcttatttttatgtgtttttacgttgctttattatattttataagaatgattgtttgacgaatcacgagaactattaagacacattattaggtatatattataaaaaagtttttgattacgatgttataagaggaaagaggacacattaacatcatacatcaattaactacattcttataacatcgtaatcaaaagaattgcaattttgatgtataacaactgtcaatgggttatggaattgtatattacatattatacggtatgttggtaacgacaaataccggtcggtaattgtctgccggtgtaatagaattatatatatctatctattacaccggccttgtatacataataataagttgtggtagtatgatctccatatttataatttaggactttgtattcagtatttttggaatcataaaaaataaaaaaaagttttactaatttaaaatttaaaaagtatttacatttttttcactgtttagtcgcggatatggaattcgatcctgccaaaatcaatacatcatctatagatcatgtaacaatattacaatacatagatgaaccaaatgatataagactaacagtatgcattatccgaaatattatatcaatatcacaaaaataaatacacatttggctaatcaatttcgggcttggaaaaaacgtatcgccggaagggactatatgactaacttatctagagatacaggaatacaacaatcaaaacttactgaaactatacgtaactgtcaaaaaaatagaaacatatatggtctatatatacactacaatttagttattaattggataaccgatgtgattatcaatcaatattaagagggttggtaaattggtacatagctaataatacctatacacccaataatacaacaaccatttctgagttggatatcatcaaaatactggataaatacgaggacgtgtatagagtaagtaaagaaaaagaatgtggaatttgctatgaagttgtttactcaaaacgatagatactttggtttattggattcgtgtactcatatattttgcataacatgcatcaatatatggcatagaacacgaagagaaaccggtgcgtcggataattgtcctatatgccgtacccgttttagaaacataacaatgagcaagttctataagctagttaactaataaataaaaagtttaatttgttgacgacgtatgtcgttatttttctcgtatgaaagattaaattcaattcaattcgttgtttctaatataatctgccgtattggatggattctcaagacaattgcatttagattatattatcatgaataaaaatagtagcacacaactacttcagcaaatattcttttttgaaacgccatctatcgtagtgaggacacaagtgaacctataatgagcaaatttattagtatcagtcacatgaaggactttctgtagagtgacgattccactatctgtggtacgaacggtttcatcttctttgatgccatcacccagatgttctataaacttggtatcctcgtccgatttcatatcctttgccaaccaatacatatagctaaactcaggcatatgttccacacatcctgaacaatgaaattctccagaagatgttacaatgtctagatttggacatttggtttcaaccgcgttaacatatgagtgaacacacccatacatgaaagcgatgagaaataggattctcatcttgccaaaatatcactagaaaaaatttatttatcagttttaaaggtataaaaaatacttattgttgctcgaatattttgtatttgatggtatacggaagattagaaatgtaggtattatcatcaactgattctatggttttatgtattctatcatgtttcactattgcgttggaaataatatcatatgcttccacatatattttattttgttttaactcataatactcacgtaattctggattattggcatatctatgaataattttagctccatgatcagtaaatattaatgagaacatagtattaccacctaccattatttttttcatctcattcaattcttaattgcaaagatctatataatcattatagcgttgacttatggactctggaatcttagacgatgtacagtcatctataatcatggcatatttaatacattgttttatagcatagtcgttatctacgatgttagatatttctctcaatgaatcaatcacataatctaatgtaggtttatgacataatagcattttcagcagttcaatgtttttagattcgttgatggcaatggctatacatgtatatccgttatttgatctaatgttgacatctgaaccggattctagcagtaaagatactagagattgtttattatatttaacagccttgtgaagaagtgtttctcctcgtttgtcaatcatgttaatgtctttaagataaggtaggcaaatgtttatagtactaagaattgggcaagcataagacatgtcacaaagaccctttttgtatgtataagtgtagaaattataacatccatagttggatttacataggtgtccaatcgggatctctccatcatcgagataattgatggcatctcccttccttttttagtagatatttcatcgtgtaagaatcaatattaatatttctaaagtatccgtgtatagcctctttatttaccacagttccatattccactagagggatatcgccgaatgtcatatactcaattagtatatgttggaggacatccgagttcattgttttcaatatcaaagagatggtttccttatcatttctccatagtggtacaatactacacattatttcgtgcggctttccattttccaaaaacaatttgaccaaatctacatctttattgtatctataatcactatttagataatcagccataattactcgagtgcaacatgttagatcgtctatatatgaataagccgtgttatctattcctttcattaacaatttaacgatgtctatatctatatgagatgacttaatataatattgaagagctgtacaatagtttttatctataaaagacggcttgattccgtgattaattagacatttaacaacttccggacgcacatatgctctcgtatccgactctgaatacagatgagagatgatatacagatgcaatacggtaccgcaatttcgtagttgataatcatcatacgcgtatcagtactcgtcctcataaagaacactgcagccattttctatgaacaaatcaataattttaggaacaggatcattgtcattacataattttctataactgaacgatggttttcacatttaacactcaagtcaaatccatgttctaccaacacctttatcaagtcaacgtctacatttttggatttcatatagctgaatatattaaagtcatttatgttgctaaatccagtggcttctagtagagccatcgctatatcctttaactttaacatgtctactatttgtgtattcttctaatggggtagctgtctccaatttttgcgtaatggattagtgccactgtctagtagtagtttgacgacctcgacattattacaatgctcattaaaaaggtatgcgtgtaaagcattattcttgaattggttcctggtatcattaggatctctgtctttcaacatctgtttaagttcatcaagagccacctcctcattttccaaatagtcaaacattttgactgaatgagctactgtgaactctatacacccacacaactaatgtcattaaatatcatgtcaaaaacttgtacaattattaataaaaataatttagtgtttaaattttaccagttccagattttacacctccgttaatacctccattaaccccactggacgatcctcctccccacattccaccgccaccagatgtataagttttagatcctttattactaccatcatgtccatggataaagacactccacatgccgccactaccccctttagaagacatattaataagacttaaggacaagtttaacaataaaattaatcacgagtaccctactaccaacctacactattatatgattatagtttctatttttacagtaccttgactaaagtttctagtcacaagagcaatactaccaacctacactattatatgattatagtttctatttttataggaacgcgtacgagaaaatcaaatgtctaatttctaacggtagtgttgataaacgattgttatccgcggatacctcctctatcatgtcgtctattttcttactttgttctattaacttattagcattatatattatttgattataaaacttatattgcttattagcccaatctgtaaatatcggattattaacatatcgtttctttgtaggtttatttaacatgtacatcactgtaagcatgtccttaccatttattttaatttgacgcatatccgcaatttctttttcgcagtcggttataaattctatatatgatggatacatgctacatgtgtacttataatcgactaatatgaagtacttgatacatattttcagtaacgatttattattaccacctatgaataagtacctgtgatcgtctaggtaatcaactgttttcttaatacattcgatggttggtaatttactcagaataatttccaatatcttaatatataattctgctatttctgggatatatttatctgccagtataacacaaatagtaatacatgtaaacccatattttgttattatattaatgtctgcgccattatctattaaccattctactaggctgacactatgcgactcaatacaatgataaagtatactacatccatgtttatctattttgtttatatcatcaatatacggcttacaaagttttagtatcgataacacatccaactcacgcatagagaaggtagggaataatggcataatatttattaggttatcatcattgtcattatctacaactaagtttccattttttaaaatatactcgacaactttaggatctctattgccaaatttttgaaaatatttatttatatgcttaaatctatataatgtagctccttcatcaatcatacatttaataacattgatgtatactgtatgataagatacatattctaacaatagatcttgtatagaatctgtatatcttttaagaattgtggatattaggatattattacataaactattacacaattctaaaatataaaacgtatcacggtcgaataatagttgatcaactatataattatcgattttgtgatttttcttcctaaactgtttacgtaaatagttagatagaatattcattagttcatgaccactatagttactatcgaataacgcgtcaaatatttcccgtttaatatcgcatttgtcaagataataatagagtgtggtatgttcacgataagtataataacgcatctctttttcgtgtgaaattaaatagtttattacgtccaaagatgtagcataaccatcttgtgacctagtaataatataataatagagaactgttttacccattctatcatcataatcagtggtgtagtcgtaatcgtaatcgtctaattcatcatcccaattataatattcaccagcacgtctaatctgttctattttgatcttgtatccatactgtatgttgctacatgtaggtattcctttatccaataatagtttaaacacatctacattgggatttgatgttgtagcgtatttttctacaatattaataccatttttgatactatttatttctatacctttcgaaattagtaatttcaataagtctatattgatgttatcagaacatagatattcgaatatatcaaaatcattgatatttttatagtcgactgacgacaataacaaaatcacaacatcgtttttgatattattatttttcttggtaacgtatgcctttaatggagtttcaccatcatactcatataatggatttgcaccactttctatcaatgattgtgcactgctggcatcgatgttaaatgttttacaactatcatagagtatcttatcgttaaccatgattggttgttgatgctatcgcattttttggtttctttcatttcagttatgtatggatttagcacgtttgggaagcatgagctcatatgatttcagtactgtagtgtcagtactattagtttcaataagatcaatctctagatctatagaatcaaaacacgataggtcagaagataatgaatatctgtaggcttcttgttgtactgtaacttctggttttgttagatggttgcatcgtgctttaacgtcaatggtacaaattttatcctcgctttgtgtatcatattcgtccctactataaaattgtatattcagattatcatgcgatgtgtatacgctaacggtatcaataaacggagcacaccatttagtcataaccgtaatccaaaaatttttaaagtatatcttaacgaaagaagttgtgtcattgtctacggtgtatggtactagatcctcataagtgtatatatctagagtaatgtttaatttattaaatggttgataatatggatcctcgtgacaatttccgaagatggaaataagacataaacacgcaataaatctaattgcggacatggttactccttaaaaaaatacgaataatcaccttggctatttagtaagtgtcatttaacactatactcatattaatccatggactcataatctctatacgggattaacggatgttctatatacggggatgagtagttctcttctttaactttatactttttactaatcatatttagactgatgtatgggtaatagtgtttgaagagctcgttctcatcatcagaataaatcaatatctctgtttttttgttatacagatgtattacagcctcatatattacgtaatagaacgtgtcatctaccttattaactttcaccgcatagttgtttgcaaatacggttaatcctttgacctcgtcgatttccgaccaatctgggcgtataatgaatctaaactttaattgcttgtaatcattcgaaataatttttagtttgcatccgtagttatcccctttatgtaactgtaaatttctcaacgcgatatctccattaataatgatgtcgaattcgtgctgtatacccatactgaatggatgaacgaataccgacggcgttaatagtaatttactttttcatctttacatattgggtactagttttactatcataagtttataaattccacaagctactatggaataagccaaccatcttagtataccacacatgtcttaaagtttattaattaattacatgttgttttatatatatcgctacgaatttaaagagaaattagtttaggaagaaaaattatctatctacatcatcacgtctctgtattctacgatagagtgctactttaagatgcgacagatccgtgtcatcaaatatatactccattaaaatgattattccggcagcgaacttgatattggatatatcacaacctttgttaatatctacgacaatagacagcagtcccatggttccataaacagtgagtttatctttctttgaagagatattttgtagagatcttataaaactgtcgaatgacatcgcatttatatctttagctaaatcgtatatgttaccatcgtaatatctaaccgcgtctatcttaaacgtttccatcgctttaaagacgtttccgatagatggtctcatttcatcagtcatactgagccaacaaatataatcgtgtataacatctttgatagaatcagactctaaagaaaacgaatcggctttattatacgcattcatgataaacttaatgaaaaatgtttttcgttgtttaagttggatgaatagtatgtcttaataattgttattatttcattaattaatatttagtaacgagtacactctataaaaacgagaatgacataactaatcataactagttatcaaagtgtctaggacgcgtaattttcatatggtatagatcctgtaagcattgtctgtattctggagctattttctctatcgcattagtgagttcagaatatgttataaatttaaatcgaataacgaacataactttagtaaagtcgtctatattaactcttttattttctagccatcgtaataccatgtttaagatagtatattctctagttactacgatctcatcgttgtctagaatatcacatactgaatctacatccaattttagaaattggtctgtgttacatatctcttctatattattgttgatgtattgtcgtagaaaactattacgtagaccattttctttataaaacgaatatatagtactccaattatctttaccgatatatttgcacacataatccattctctcaatcactacatctttaagattttcgttgttaagatatttggctaaactatataattctattagatcatcaacagaatcagtatatatttttctagatccaaagacgaactctttggcgtcctctataatattcccagaaaagatattttcgtgttttagtttatcgagatctgatctgttcatatacgccatgattgtacggtacgttatgataaccgcataaaataaaaatccattttcatttttaaccaatactattcataattgagattgatgtaatactttgttactttgaacgtaaagacagtacacggatccgtatctccaacaagcacgtagtaatcaaatttggtgttgttaaacttcgcaatattcatcaatttagatagaaacttatactcatcatctgttttaggaatccatgtattattaccactttccaacttatcattatcccaggctatgtttcgtccatcatcgttgcgcagagtgaataattcttttgtattcggtagttcaaatatatgatccatgcatagatcggcaaagctattgtagatgtgatttttcctaaatctaatataaaactcgtttactagcaaacactttcctgatttatcgaccaagacacatatggtttctaaatctatcaagtggtggggatccatagttatgacgcagtaacatatattattacattcttgactgtcgctaatatctaaatatttattgttatcgtattggattctgcatatagatggcttgtatgtcaaagatatagaacacataaccaatttatagtcgcgctttacattctcgaatctaaagttaagagatttagaaaacattatatcctcggatgatgttatcactgtttctggagtaggatatattaaagtctttacagatttcgtccgattcaaataaatcactaaataatatcccacattatcatctgttagagtagtatcattaaatctattatattttatgaaagatatatcactgctcacctctatatttcgtacatttttaaactgtttgtataatatctctctgatacaatcagatatatctattgtgtcggtagacgataccgttacatttgaattaatggtgttccattttacaacttttaacaagttgaccaattcatttctaatagtatcaaactctccatgattaaatattttaatagtatccattttatatcactacggacacaaagtagctgacataaaccattgtataatttttatgttttatgtttattagcgtacacattttggaagttccggcttccatgtatttcctggagagcaagtagatgatgaggaaccagatagtttatatccgtacttgcacttaaagtctacattgtcgttgtatgagtatgatcttttaaacccgctagacaagtatccgtttgatattgtaggatgtggacatttaacaatctgacacgtgggtggatcggaccattctcctcctgaacacaggacactagagttaccaatcaacgaatatccactattgcaactataagttacaacgctcccatcggtataaaaatcctcgtatccgttatgtcttccgttggatatagatggaggggattggcatttaacagattcacaaataggtgcctcgggattccataccatagatccagtagatcctaattcacaatacgatttagattcaccgatcaactgatatccgctattacaagagtacgttatactagagccaaagtctactccaccaatatcaagttggccattatcgatatctcgaggcgatgggcatctccgtttaatacattgattaaagagtgtccatccagtacctgtacatttagcatatataggtcccattttttgctttctgtatccaggtagacatagatattctatagtgtctcctatgttgtaattagcattagcatcagtctccacactattcttaaatttcatattaatgggtcgtgacggaatagtacagcatgatagaacgcatcctattcccaacaatgtcaggaacgtcacgctctccaccttcatatttatttatccgtaaaaatgttatcctggacatcgtacaaataataaaaagcccatatatgttcgctattgtagaaattgtttttcacagttgctcaaaaacgatggcagtgacttatgagttacgttacactttggagtctcatctttagtaaacatatcataatattcgatattacgagttgacatatcgaacaaattccaagtatttgattttggataatattcgtattttgcatctgctataattaagatataatcaccgcaagaacacacgaacatctttcctacatggttaaagtacatgtacaattctatccatttgtcttccttaactatatatttgtatagataattacgagtctcgtgagtaattccagtaattacatagatgtcgccgtcgtactctacagcataaactatactatgatgtctaggcatgggagacttttttatccaacgatttttagtgaaacattccacatcgtttaatactacatatttctcatacgtggtataaactccacccattacatatatatcatcgtttacgaataccgacgcgcctgaatatctaggagtaattaagtttggaagtcttatccatttcgaagtgccgtgtttcaaatattctgccacacccgttgaaatagaaaattctaatcctcctattacatataactttccatcgttaacacaagtactaacttctgattttaacgacgacatattagtaaccgttttccattttttcgttttaagatctacccgcgatacggaataaacatgtctattgttaatcatgccgccaataatgtatagacaattatgtaaaacatttgcattatagaattgtctatctgtattaccgactatcgtccaatattctgttctaggagagtaatgggttattgtggatatataatcagagtttttaatgactactatattatgttttataccatttcgtgtcactggctttgtagatttggatatagttaatcccaacaatgatatagcattgcgcatagtattagtcataaacttgggatgtaaaatgttgatgatatctacatcgtttggatttttatgtatccactttaataatatcatagctgtaacatcctcatgatttacgttaacgtcttcgtgggataagatagttgtcagttcatcctttgataattttccaaattctggatcggatgtcaccgcagtaatattgttgattatttctgacatcgacgcattatatagttttttaattccatatcttttagaaaagttaaacatccttatacaatttgtgaaattaatattatgaatcatagtttttacacatagatctactacaggcggaacatcaattattatggcagcaactagtatcatttctacattgtttatggtgatgtttatcttcttccagcgcatatagtctaatagcgattcaaacgcgtgatagtttataccattcaatataatcgcttcatcctttagatggtgatcctgaatgcgtttaaaaaaattatacggagacgccgtaataatttccttattcacttgtataatttccccattgatagaaaatattacgctttccattcttaaagtactataagtaattatagtataatgtaaacgtttatatattcaatatttttataaaaatcattttgacattaattcctttttaaatttccgtctatcatctatagaaacgtattctatgaatttataaaatgcttttacgtgtcctatcgtaggcgatagaaccgctaaaaagcctatcgaatttctacaaaagaatctgttatatggtatagggagagtataaaacattaaatgtccgtacttattaaagtattcagtagccaatcctaactctttcgaatacttattaatggctcttgttctgtacgaatctatttttttgaacaacggacctagtggtatatcttgttctatgtatctaaaataatgtctgactagatccgttagtttaatatccgcagtcatcttgtctagaatggcaaatctaactgcgggtttaggctttagtttagtttctatatctacatctatgtctttatctaacaccaaaaatataatagctaatattttattacaatcatccggatattcttctacgatctcactaactaatgtttctttggttatactagtatagtcactatcggacaaataaagaaaatcagatgatcgatgaataatacatttaaattcatcatctgtaagatttttgagatgtctcattagaatattattagggttagtactcattatcattcggcagctattacttattttattatttttcaccatatagatcaatcattagatcatcaaaatatgtttcaatcatcctaaagagtatggtaaatgactcttcccatctaatttctgaacgttcaccaatgtctctagccactttggcactaatagcgatcattcgcttagcgtcttctatattattaactggttgattcaatctatctagcaatggaccgtcggacagcgtcattctcatgttcttaatcaatgtacatacatcgccgtcatctaccaattcatccaacaacataagctttttaaaatcatcattataataggtttgatcgttgtcatttctccaaagaatatatctaataagtagagtcctcatgcttagttaacaactattttttatgttaaatcaattagtacaccgctatgtttaatacttattcatattttagtttttaggattgagaatcaatacaaaaattaatgcatcattaattttagaaatacttagtttccacgtagtcaatgaaacatttgaactcatcgtacaggacgttctcgtacaggacgtaactataaaccggtttatatttgttcaagatagatacaaatccgataactttttttacgaattctacgggatccactttaaaagtgtcataccgggttctttttatttttttaaacagatcaatggtgtgatgttgattaggtcttttacgaatttgatatagaatagcgtttacatatcctccataatggtcaatcgccatttgttcgtatgtcataaattctttaattatatgacactgtgtattatttagttcatccttgttcattgttaggaatctatccaaaatggcaattatactagaactataggtgcgttgtatacacatattgatgtgtctgtttatacaatcaatgctactaccttcgggtaaaattgtagcatcatataccatttctagtactttaggttcattattatccattgcagaggacgtcatgatcgaatcataaaaaaatatattatttttatgttattttgttaaaaataatcatcgaatacttcgtaagatactccttcatgaacataatcagttacaaaacgtttatatgaagtaaagtatctacgatttttacaaaagtccggatgcataagtacaaagtacgcgataaacggaataataatagatttatctagtctatctttttctatagctttcatagttagatacatggtctcagaagtaggattatgtaacatcagcttcgataaaatgactgggttatttagtcttacacattcgctcatacatgtatgaccgttaactacagagtctacactaaaatgattgaacaatagatagtctaccattgtttcgtattcagatagtacagcgtagtacatggcatcttcacaaattatatcattgtctaatagatatttgacgcatcttatggatcccacttcaacagccatcttaaaatcggtagaatcatattgctttcctttatcattaataatttctagaacatcatctctatcataaaagatacaaatattaactgtttgatccgtaataacattgctagtcgatagcaatttgttaataagatgcgctgggctcaatgtcttaataagaagtgtaagaggactatctccgaatttgttttgtttattaacatccgttgatggaagtaaaagatctataatgtctacattcttgactgttttagagcatacaatatggagaggtgtatttccatcatgatctggttttgagggactaattcctagtttcatcatccatgagattgtagaagcttttggattgtctgacataagatgtctatgaatatgatttttgccaaatttatccactatcctggcttcgaatccgatggacattatttttttaaacactctttctgaaggatctgtacacgccaacaacggaccacatccttcttcatcaaccgagttgttaatcttggctccatactgtaccaataaatttattctctctatgacttcatcatctgttcccgagagataatatagaggcgttttatgctgtttatcacacgcgtttggatctgcgccgtgcgtcagcagcatcgcgactattctattattattaattttagaagctatatgcaatggataatttccatcatcatccgtctcatttggagagtatcctctatgaagaagttcttcgacaaatcgttcatctagtcctttaattccacaatacgcatgtagaatgtgataattatttccagaaggttcgatagcttgtagcatattcctaaatacatctaaatttttactattatatttggcataaagagatagataatactcggccgacataatgttgtccattgtagtataaaaattaatatttctatttctgtatatttgcaacaatttactctctataacaaatatcataacttagttcttttatgtcaagaaggcactggtttagttcatctataaatgtcacgccataactaccacgcatgccatactcagaattatgataaagatatttatccttggggtgtaggtaatggggattaatctttgttggatcagtctctaagttaacacatgtcacacatgatccatttatagttatatcacacgatgatgatttatgaattgattccggaagatcgctatcgtattttgtggttccacaattcatttccatacatgttattgtcacactaatattatgatgaactttatctagccgctgagtggtaaacaacagaacagatagtttattatctttaccaacaccctcagccgctgccacaaatctctgatccgtatccatgatggtcatgtttatttctagtccgtatccagtcaacactatgttagcatttctgtcgatatagctttcactcatatgacactcaccaataatagtagaattaatgtcgtaatttacaccaatagtgagttcggcggcaaagtaccaataccggtaatcttgtcgaggaggacatatagtattcttgtattctaccgaatacccgagagatgcgatacaaaagagcaagactaatttgtaaaccatcttactcaaaatatgtaacaatagtacgatgcaatgagtaagacaataggaaatctatcttatatacacataattattctatcaattttaccaattagttagtgtaatgttaacaaaaatgtgggagaatctaattagtttttctttacacaattgacgtacatgagtctgagttccttgtttttgctaattatttcatccaatttattattcttgacgatatcgagatcttttgtataggagtcaaacttgtattcaacatgcttttctataatcattttagctatttcggcatcatccaatagtacattttccagattagcagaatagatattaatgtcgtatttgaacagagcctgtaacatctcaatgtctttattatctatagccaatttaatgtccggaatgaagagaagggaattattggtgtttgtcgacgtcatatagtcgagcaagagaatcatcatatccacgtgtccattttttatagtgatgtgaatacaactaaggagaatagccagatcaaaagtagatggtatctctgaaagaaagtaggaaacaatacttacatcattaagcatgacggcatgataaaatgaagttttccatccagttttcccatagaacatcagtctccaatttttcttaacaaacagttttaccgtttgcatgttaccactatcaaccgcataatacaatgcggtgtttcccttgtcatcaaattgtgaatcatccagtccactgaatagcaaaatctttactattttggtatcttccaatgtggctgcctgatgtaatggaaattcattctctagaagatttttcaatgctccagcgttcaacaacgtacatactagacgcacgttattatcagctattgcataatacaaggcactatgtccatggacatccgccttaaatgtatctttactagagagaaagcttttcagctgcttagacttccaagtattaattcgtgacagatccatgtctgaaacaagacgctaattagtgtatattttttcattttttataattttgtcatattgcaccagaattaataatatctctaatagatctgattagtagatacatggctatcgcaaaacaacatatacacatttaataaaaataatatttattaagaaaattcagatttcacgtacccatcaatataaataaaataatgattccttacaccgtacccatattaaggagattccaccttacccataaacaatataaatccagtaatatcatgtctgatgatgaacacaaatggtgtattaaattccagtttttcaggagatgatctcgccgtagctaccataatagtagatgcctctgctacagttccttgttcgtcgacatctatctttgcattctgaaacattttataaatatataatgggtccctagtcatatgtttaaacgacgcattatctggattaaacatactaggagccatcatttcggctatcgacttaatatccctcttattttcgatagaaaatttagggagtttaagattgtacactttatttcctaattgagacgaccaatagtctaattttgcagccgtgatagaatctgtgaaatgggtcatattatcacctattgccaggtacatactaatattagcatccttatacggaaggcgtaccatgtcatattctttgtcatcgattgtgattgtatttccttgcaatttagtaactacgttcatcatgggaaccgttttcgtaccgtacttattagtaaaactagcattgcgtgttttagtgatatcaaacggatattgccatatacctttaaaatatatagtattaatgattgcccatagagtattattgtcgagcatattagaatctactacattagacataccggatctacgttctactatagaattaattttattaaccgcatctcgtctaaagtttaatctatataggccgaatctatgatattgttgataatacgacggtttaatgcacacagtattatctacgaaactttgataagttagatcagtgtacgtatatttagatgttttcagcttagctaatcctgatattaattctgtaaatgctggacccagatctctttttctcaaatccatagtcttcaataattctattctagtattacctgatgcaggcaatagcgacataaacatagaaaacgaataaccaaacggtgagaagacaatattatcatcttgaatatttttatacgctactataccggcattggtaaatccttgtagacgataggcggacgctgaacacgctaacgatagtatcaataacgcaatcatgattttatggtattaataattaaccttatttttatgttcggtataaaaaaattattgatgtctacacatccttttgtaattgacatctatatatccttttgtataatcaactctaatcactttaacttttacagttttccctaccagtttatccctatattcaacatatctatccatatgcatcttaacactctctgccaagatagcttcagagtgaggatagtcaaaaagataaatatatagagcataatcattctcgtatactctgccctttattacatcacccgcattgggcaacgaataacaaaatgcaagcatcttgttaacgggctcgtaaattgggataaaaattatgtttttattgtcttatatctattttattcaagagaatattcaggaatttctttttccggttgtatctcgtcgcagtatatatcatttgtacattgtttcatattttttaatagtttacaccttttagtaggactagtatcgtacaattcatagctgtattttgaattccaatcacgcataaaaatatcttccaattgttgacgaagacctaatccatcatccggtgtaatattaatagatgctccacatgtatccgtaaagtaatttcctgtccaatttgaggtacctatataggccgttttatcggttaccatatatttggcatggtttaccctagaatacggaatgggaggatcagcatctggtacaataaatagctttacttctatatttatgtttttagattttagcatagcgatagatcttaaaaagtttctcatgataaacgaagatcgttgccagcaactaatcaatagcttaacggatacttgtctgtctatagcggatcttcttaattcatcttctatataaggccaaaacaaaattttacccgccttcgaataaataatagggataaagttcataacagatacataaacgaatttactcgcatttctaatacatgacaataaagcggttaaatcattggttctttccatagtacatagttgttgcggtgcagaagcaataaatacagagtgtggaacgccgcttacgttaatactaagaggatgatctgtattataatacgacggataaaagtttttccaattatatggtagattgttaactccaagataccagtatacctcaaaaatttgagtgagatccgctgccaagttcctattattgaagatcgcaatacccaattccttgacctgagttagtgatctccaatccatgttagcgcttcctaaataaatatgtgtattatcagatatccaaaattttgtatgaagaactcctcctaggatatttgtaatatctatgtatcgtacttcaactccggccatttgtagtctttcaacatcctttaatggtttgttagatttattgacggctactctaactcgtactcctcttttgggtaattgtacaatctcgtttaatattatcgtgccgaaattcgtacccacttcatccgataaactccaataaaaagatgatatatctagtgtttttgtggtattggatagaatttccctccacatgttaaatgtagacaaatatactttatcaaattgcatacctataggaatagtttctgtaatcactgcgattgtattatccggattcattttatttgttaaaagaataatcctatatcacttcactctattaaaaatccaagtttctatttctttcatgactgattttttaacttcatccgtttccttatgaagatgatgtttggcaccttcataaatttttatttctctattacaatttgcatgttgcatgaaataatatgcacctaaaacatcgctaatcttattgtttgttccctggagtatgagagtcgggggggtgttaatcttggaaattatttttctaaccttgttggtagccttcaagacctgactagcaaatccagccttaattttttcatgattgactaatgggtcgtattggtatttataaactttatccatatctctagatactgattctggacatagctttccgactggcgcatttggtgtgatggttcccataagtttggcagctagcagattcagtcttgaaacagcatctgcattaactagaggagacattagaatcattgctgtaaacaagtttggattatcgtaagaggctagctcccatggaatgacccaataagtagatttaatagttaccacgtgctgtaccaaagtcatcaatcatcattttttcaccattacttcttccatgtccaatatgatcatgtgagaatactaaaattcctaacgatgatatgttttcagctagttcgtcataacgtccagaatgtttaccagctccatgacttatgaatactaatgccttaggatatgtaataggtttccaatatatgtaatcattgtccagattgaacatacagtttgcactcatgattcacgttatataactatcaatattaacagttcgtttgatgatcatattatttttatgttttattgataattgtaaaaacatacaattaaatcaatatagaggaaggagacggctactgtcttttgtgagatagtcatggcgactaaattagattatgaggatgctgttttttactttgtggatgatgataaaatatgtagtcgcgactccatcatcgatctaatagatgaatatattacgtggagaaatcatgttatagtgtttaacaaagatattaccagttgtggaagactgtacaaggaattgatgaagttcgatgatgtcgctatacggtactatggtattgataaaattaatgagattgtcgaagctatgagcgaaggagaccactacatcaattttacaaaagtccatgatcaggaaagtttattcgctaccataggaatatgtgctaaaatcactgaacattggggatacaaaaagatttcagaatctagattccaatcattgggaaacattacagatctgatgaccgacgataatataaacatcttgatactttttctagaaaaaaaattgaattgatgatataggggtcttcataacgcataattattacgttagcattctatatccgtgttaaaaaaaattatcctatcatgtatttgagagttttatatgtagcaaacatgatagctgtgatgccaataagctttagatattcacgcgtgctagtgttagggatggtattatctggtggtgaaatgtccgttatataatctacaaaacaatcatcgcatatagtatgcgatagtagagtaaacatttttatagtttttactggattcatacatcgtctacccaattcggttataaatgaaattgtcgccaatcttacacccaaccccttgttatccattagcatagtattaacttcgttatttatgtcataaactgtaaatgattttgtagatgccatatcatacatgatattcatgtccctattataatcattactaactttatcacaatatatgttgataatatctatatatgatctagtctttgtgggcaactgtctatacaagtcgtctaaacgttgtttactcatatagtatcgaacagccatcattacatggtcccgttccgttgatagataatcgagtatgttagtggacttgtcaaatctatataccatattttctggaagtggatatacatagtcgtgatcaacattattgctagcctcatcttctatatcctgtactataccattatctatatcatctacataatctatgatattattacacataaacatcgacaacatactattgtttattatctaagtcctgttgatccaaacccttgatctcctctatttgtactatctagagattgtacttcttccagttctggataatatatacgttgatagattagctgagctattctatctccagtatttacattaaacgtacattttccattattaataagaatgactcctatgtttcccctataatcttcgtctattacaccgcctcctatatcaatgccttttagtgacagaccagacctaggagctattctaccatagcaaatcttaggcatggacatactaatatctgtcttaattaactgtctttctcctggagggatagtataatcgtaagcgctatacaaatcatatccggcagcacccggcgattgcctagtaggagatttagctctgttagtttccttaacaaatctaactggtgagttaatattcatgttgaacataaaactaatattttatttcaaaattatttaccatcccatatattccatgaataagtgtgatgattgtacacttctatagtatctatatacgattcacgataaaatcctcctatcaatagcagtttattatccactatgatcaattctggattatccctcggataaataggatcatctatcagagtccatgtattgctggattcacaataaaattccgcatttctaccaaccaagaataaccttctaccgaacactaacgcgcatgatttataatgaggataataagtggatggtccaaactgccactgatcatgattgggtagcaaatattctgtagttgtatcagtttcagaatgtcctcccattacgtatataacattgtttatagatgccactgctggattacatctaggtttcagaagactcggcatattaacccaagcagcatccccgtggaaccaacgctcaacagatgtgggatttggtagacctcctactacgtataatttattgttagcgggtatcccgctagcatacagtctggggctattcatcggaggaattggaatccaattgtttgatatataatttaccgctatagcattgttatgtatttcattgttcatccatccaccgatgagatatactacttctccaacatgagtacttgtacacatatggaatatatctataatttgatccatgttcataggatactctatgaatggatacttgtatgatttgcgtggttgtttatcacaatgaaatattttggtacagtctagtatccattttacattatttatacctctgggagaaagataatttgacctgattacatttttgataaggagtagcagatttcctaatttatttcttcgctttatataccacttaatgacaaaatcaactacataatcctcatctggaacatttagttcatcgctttctagaataagttttatagatagataatcaaaattgtctatgatgtcatcttctagttccaaaaagtgtttggcaataaagtttttagtatgacataagagattggatagtccgtattctatacccatcatgtaacactcgacacaatattcctttctaaaatctcgtaagataaagtttatacaagtgtagatgataaattctacagaggttaatatagaagcacgtaataaattgacgacgttatgactatctatatatacctttccagtatatgagtaaataactatagaagttagactgtgaatgtcaaggtctagacaaacccttgtaactggatctttatttttcgtgtatttttgacgtaaatgtgtgcgaaagtaaggagataactttttcaatatcgtagaattgactattatattgccacctatagcatcaataattgttttgaatttcttagtcatagacaatgctaatatattcttacagtacacagtattgacaaatatcggcatttatgtttctttaaaagtcaacatctagagaaaaatgattatctttttgagacataactcccattttttggtattcacccacacgtttttcgaaaaaattagtttttccttccaatgatatattttccatgaaatcaaacggattggtaacattataaatttttttaaatcccaattcagaaatcaatctatccgcgacgaattctatatatgttttcatcatttcacaattcattcctataagtttaactggaagagccgcagtaagaaattcttgttcaatggataccgcatctgttataatagatctaacggtttcttcactcggtggatacaataaatgtttaaacatcaaacatgcgaaatcgcagtgcagaccctcgtctctactaattagttcgttggaaaacgtgagtccgggcattaggccacgctttttaagccaaaatatggaagcgaatgatccggaaaagaagattccttctactgcagcaaaggcaataagtctctctccataaccggcgctgtcatgtatccacttttgagcccaatcggccttcttttttacacaaggcatcgtttctatggcattaaagagatagtttttttcattactatctttaacataagtatcgatcaaaagactatacatttccgaatgaatgttttcaatggccatctgaaatccgtagaaacatctagcctcggtaatctgtacttctgtacaaaatcgttccgccaaattttcattcactattccgtcactggctgcaaaaaacgccaatacatgttttataaaatatttttcgtctggtgttagtttattccaatcattgatatctttagatatatctacttcttccactgtccaaaatgatgcctctgcctttttatacatgttccagatgtcatgatattggattgggaaaataacaaatctatttggatttggtgcaaggatgggttccataactaaattaacaataacaataaattttttttcagttatctatatgcctgtacttggattttttgtacatcgatatcgccgcaatcactacaataattacaagtattattgatagcattgttattagtactatcataattaaattatctacattcatgggtgctgaataatcgttattatcatcattatcattttgtaattgtgacatcatactagataaatcgtttgcgagattgttgtgggaagcgggcatggaggatgcattatcattattatttaacgccttccatttggattcacaaatgttacgcacattcaacattttatggaaactataattttgtgaaaacaaataacaagaaaactcgtcatcgttcaaatttttaacgatagtaaaccgattaaacgtcgagctaatttctaacgctagcgactctgttggatatgggtttccagatatatatcttttcagttcccctacgtatctataatcatctgtaggaaatggaagatatttccatttatctactgttcctaatatcatatgtggtggtgtagtagaaccattaagcgcgaaagatgttatttcgcatcgtattttaacttcgcaataatttctggttagataacgcactctaccagtcaagtcaatgatattagcctttacagatatattcatagtagtcgtaacgatgactccatcttttagatgcgatactcctttgtatgtaccagaatcttcgtacctcaaactcgatatatttaaacaagttaatgagatattaacgcgttttatgaatgatgatatataaccagaagttttatcctcggtggctagcgctataaccttatcattataataccaactagtgtgattaatatgtgacacgtcagtgtgggtacaaatatgtacattatcgtctacgtcgtattcgatacatccgcatacagccaacaaatataaaatgacaaatactctaacgccgttcgtacccatcttgatgcggtttaataaatgttttgatttcaatttattgtaaaaaaagattcggttttatactgttcgatattctcattgcttatattttcatctatcatctccacacagtcaaatccgtggttagcatgcacctcatcaaccggtaaaagactatcggactcttctatcattataactctagaatatttaatttggtcattattaatcaagtcaattatcttatttttaacaaacgtgagtattttactcattttttataaaaacttttagaaatatacagactctatcgtgtgtctatatcttctttttatatccaatgtatttatgtctgatttttcttcatttatcatatataatggtccaaattctacacgtgcttcggattcatccagatcattaaggttcttataattgtaacatccttctcttccctcttctacatcttccttcttattcttattcttagcgtcacagaatctaccacagcaggatcccatgacgagcgtcatattaaactaatccattttcaattataatatatgattagtaatgaccattaaaataaaaaatattcttcataaccggcaagaaagtgaaaagttcacattgaaactatgtcagtagtatacatcatgaaatgatgatatatatatactctattttggtggaggattatatgatataattcgtggataatcatttttaagacacatttctttattcgtaaatcttttcacgttaaatgagtgtccatattttgcaatttcttcatatgatggcggtgtacgtggacgaggctgctcctgttcttgttgtggtcgccgactgtcgtgtctgcgtttagatccctccattatcgcgattgcgtagatggagtactattttataccttgtaattaaatttttttattaattaaacgtataaaaacgttccgtatctgtatttaagagccagatttcgtctaatagaacaaatagctacagtaaaaataactagaataattgctacacccactagaaaccacggatcgtaatacggcaatcggttttcgataataggtggaacgtatattttatttaaggacttaacaattgtctgtaaaccacaatttgcttccgcggatcctgtattaactatctgtaaaagcatatgttgaccgggcggagccgaacattctccgatatctaatttctgtatatctataatattattaacctccgcatacgcattacagttcttttctagcttggataccgcactaggtacatcgtctagatctattcctatttcctcagcgatagctcttctatccttttccggaagcaatgaaatcacttcaataaatgattcaaccatgagtgtgaaactaagtcgagaattactcatgcatttgttagttattcggagcgcgcaatttttaaactgtcctataacctctcctatatgaatagcacaagtgacattagtagggatagaatgttgagctaatttttgtaaataactatctataaaaagattatacaaagttttaaactctttagtttccgccatttatccagtctgagaaaatgtctctcataataaatttttccaagaaactaattgggtgaagaatggaaacctttaatctatatttatcacagtctgttttggtacacatgatgaattcttccaatgccgtactaaattcgatatctttttcgatttctggatatgtttttaataaagtatgaacaaagaaatggaaatcgtaataccagttatgtttaactttgaaattgttttttattttcttgttaatgattccagccacttgggaaaagtcaaagtcgtttaatgccgatttaatacgttcattaaaaacaaactttttatcctttagatgaattattattggttcattggaatcaaaaagtaagatattatcgggtttaagatctgcgtgtaaaaagttgtcgcaacagggtagttcgtagattttaatgtataacagagccatctgtaaaaagataaactttatgtattgtaccaaagatttaaatcctaatttgatagctaactcggtatctactttatctgccgaatacagtgctaggggaaaaattataatgtttcctctttcatattcgtagttagttctcttttcatgttcgaaaaagtgaaacatgcggttaaaatagtttataacattaatattactgttaataactgccggataaaagtgggatagtaatttcacgaatttgatactgtcctttctctcgttaaacgcctttaaaaaaactttagaagaatatctcaatgagagttcctgaccatccatagtttgtatcaataatagcaacatatgaagaacccgtttatacagagtatgtaaaaatgttaatttatagtttaatcccatggcccacgcacacacgattaattttttttcatctccctttagattgttgtatagaaatttgggtactgtgaactccgccgtagtttccatgggactatataattttgtggcctcgaatacaaattttactacatagttatctatcttaaagactataccatatcctcctgtagatatgtgataaaaatcgtcgtttataggataaaatcgtttatccttttgttggaaaaaggatgaattaatgtaatcattctcttctatctttagtagtgtttccttattaaaattcttaaaataatttaacaatctaactgacggagcccaattttggtgtaaatctaattgggacattatattgttaaaatacaaacagtctcctaatataacagtatctgataatctatggggagacatccattgatattcaggggatgaatcattggcaacacccatttattgtacaaaaagccccaatttacaaacgaaagtccaggtttgatagagacaaactattaactattttgtctctgtttttaacacctccacagtttttaatttctttagtaatgaaattattcacaatatcagtatcttctttatctaccagagattttactaacttgataaccttggctgtctcattcaatagggtagtaatatttgtatgtgtgatattgatatctttttgaattgtttcttttagaagtgattctttgatggtgccagcatacgaattacaataatgcagaaactcggttaacatgcaggaattatagtaagccaattccaattgttgcctgtgttgtattagagtgtcaatatgagcaatggtgtccttgcgtttctctgatagaatgcgagcagcgattttggcgttatcatttgacgatatttctggaatgacgaatcctgtttctactaactttttggtaggacaaagtgaaacaatcaagaagatagcttctcctcctatttgtggaagaaattgaactcctctagatgatctactgacgatagtatctccttgacagatattggaccgaattacagaagtacctggaatgtaaagccctgaaaccccctcattttttaagcagattgttgccgtaaatcctgcactatgcccaagatagagagctcctttggtgaatccatctctatgtttcagtttaaccaagaaacagtcagctggtctaaaatttccatctctatctaatacagcatctaacttgatgtcaggaactatgaccggtttaatgttatatgtaacattgagtaaatccttaagttcataatcatcactgtcatcagttatgtacgatccaaacaatgtttctaccggcatagtggatacgaagatgctatccatcagaatgtttccctgattagtattttctatatagctattcttctttaaacgattttccaaatcagtaactatgttcatttttttaggagtaggacgcctagccagtatggaagaggattttctagatcctctcttcaacatctttgatctcgatggaatgcaaaaccccatagtgaaacaaccaacgataaaaataatattgtttttcactttttataattttaccatctgactcatggattcattaatatctttataagagctactaacgtataattctttataactgaactgagatatatacaccggatctatggtttccataattgagtaaatgaatgctcggcaataactaatggcaaatgtatagaacaacgaaattatactagagttgttaaagttaatattttctatgagctgttccaataaattatttgttgtgactgcgttcaagtcataaatcatcttgatactatccagtaaaccgtttttaagttctggaatattatcatcccattgtaaagcccctaattcgactatcgaatatcctgctctgatagcagtttcaatatcgacggacgtcaatactgtaataaaggtggtagtattgtcatcatcgtgataaactacgggaatatggtcgttagtaggtacggtaactttacacaacgcgatatataactttccttttgtaccatttttaacgtagttgggacgtcctgcagggtattgttttgaagaaatgatatcgagaacagatttgatacgatatttgttggattcctgattattcactataatataatctagacagatagatgattcgataaatagagaaggtatatcgttggtaggataatacatccccattccagtattctcggatactctattgatgacactagttaagaacatgtcttctattctagaaaacgaaaacatcctacatggactcattaaaacttctaacgctcctgattgtgtctcgaatgcctcgtacaaggatttcaaggatgccatagattctttgaccaacgatttagaattgcgtttagcatctgatttttttattaaatcgaatggtcggctctctggtttgctaccccaatgataacaatagtcttgtaaagataaaccgcaagaaaatttatacgcatccatccaaataaccctagcaccatcggatgatattaatgtattattatagattttccatccacaattattgggccagtatactgttagcaacggtatatcgaatagattactcatgtaacctactagaatgatagttcgtgtactagtcataatatctttaatccaatctaaaaaatttaaaattagattttttacactgttaaagttaacaaaagtattacccgggtacgtggatatcatatatggcattggtccattatcagtaatagctccataaactgatacggcgatggtttttatatgtgtttgatctaacgaggaagaaattcgcgcccacaattcatctctagatatgtatttaatatcaaacggtaacacatcaatttcgggacgcgtatatgtttctaaatttttaatccaaatataatgatgacctatatgccctattatcatactgtcaactatagtacacctagggaacttacgatacatctgtttcctataatcgttaaattttacaaatctataacatgctaaaccttttgacgacagccattcattaatttctgatatggaatctgtattctcgataccgtatcgttctaaagccagtgctatatctccctgttcgtgggaacgctttcgtataatatcgatcaacggataatctgaagtttttggagaataatatgactcatgatctatttcgtccataaacaatctagacataggaattggaggcgatgatcttaattttgtgcaatgagtcgtcaatcctataacttctaatcttgtaatattcatcatcgacataatactatctatgttatcatcgtatattagtataccatgaccttcttcatttcgtgccaaaatgatatacagtcttaaatagttacgcaatatctcaatagtttcataattgttagctgttttcatcaaggtttgtatcctgtttaacatgatggcgttctataacgtctctattttctatttttaattttttaaatttttaacgatttactgtggctagatacccaatctctctcaaatatttttttagcctcgcttacaagctgtttatctatactattaaaactgacgaatccgtgattttggtaatgggttccgtcgaaatttgccgaagtgatatgaacatattcgtcgtcgactatcaacaattttgtattattctgaatagtgaaaaccttcacagatagatcattttgaacacacaacgcatctagacttttggcggttgccatagaatatacgtcgttcttatcccaattaccaactagaagtctgatcttaactcctctattaatggctgcttctataatggagttgtaaatgtcgggccaatagtagctattaccgtcgacacgtgtagtgggaactatggccaaatgttcaatatctatactagtcttagctgacctgagtttatcaataactacatcggtatctagatctctagaatatcccaataggtgttccggagaatcagtaaagaacactccacctataggattcttaatatgatacgcagtgctaactggcaaacaacaagccgcagagcataaattcaaccatgaattttttgcgctattaaaggctttaaaagtatcaaatcttctacgaagatctgtggccagcgggggataatcagaatatacacctaacgttttaatcgtatgtatagatcctccagtaaatgacgcgtttcctacataacatctttcatcatctgacacccaaaaacaaccgagtagtagtcccacattattttttttatctatattaacggttataaaatttatatccgggcagtgactttgtagctctcccagatttcttttccctcgttcatctagcaaaactattattttaatccctttttcagatgcctcttttagtttatcaaaaataagcgctcccctagtcgtactcagaggattacaacaaaaagatgctatgtatatatatttcttagctagagtgataatttcgttaaaacattcaaatgttgttaaatgatcggatctaaaatccatattttctggtagtgtttctaccagcctacattttgctcccgcaggtaccgatgcaaatggccacatttagttaacataaaaacttatacatcctgttctatcaacgattctagaatatcatcggctatatcgctaaaattttcatcaaagtcgacatcacaacctaactcagtcaatatattaagaagttccatgatgtcatcttcgtctatttctatatccgtatccattgtagattgttgaccgattatcgagtttaaatcattactaatactcaatccttcagaatacaatctgtgtttcattgtaaatttataggcggtgtatttaagttggtagattttcaattatgtattaatatagcaacagtagttcttgctcctccttgattctagcatcctcttcattattttcttctacgtacataaacatgtccaatacgttagacaacacaccgacgatggcggccgctacagacacgaatatgactaaaccgatgaccatttaaaaacccctctctagctttcacttaaactgtatcgatcattcttttagcacatgtataatataaaaacattattctatttcgaatttaggcttccaaaaatttttcatccgtaaaccgataataatatatatagacttgttaatagtcggaataaatagattaatgcttaaactatcatcatctccacgattagagatacaatatttacattctttttgctgtttcgaaactttatcaatacacgttaatacaaacccaggaaggagatattgaaactgaggctgttgaaaatgaaacggtgaatacaataattcagataatgtaaaatcatgattccgtattctgatgatattagaactgctaatggatgtcgatggtatgtatctaggagtatctattttaacaaagcatcgatttgctaatatacaattatccttttgattaattgttattttattcatattcttaaaaggtttcatatttatcaattcttctacattaaaaatttccatttttaatttatgtagccccgcaatactcctcattacgtttcattttttgtctataatatccattttgttcatctcggtacatagattatccaattgagaagcgcatttagtagttttgtacattttaagtttattgacgaatcgtcgaaaactagttatagttaacattttattatttgataccctgatattaatacccctgccgttactattatttataactgatgtaatccacgtaacattggaattaactatcgatagtaatgcatcgacgcttccaaaattgtctattataaactcaccgataatttttttattgcatgttttcatattcattaggattatcaaatctttaatcttattacgattgtatgcgttgatattacaagacgtcattctaaaagacggaggatctccatcaaatgccagacaatcacgtacaaagtacatggaaataggttttgttctattgcgcatcatagatttatatagaacacccgtagaaatactaatttgttttactctataaaatactaatgcatctatttcatcgttttgtataacgtctttccaagtgtcaaattccaaatttttttcattgatagtaccaaattcttctatctctttaactacttgcatagataggtaattacagtgatgcctacatgccgttttttgaaactgaatagatgcgtctagaagcgatgctacgctagtcacaatcaccactttcatatttagaatatatatatgtaaaaatatagtagaatttcattttgtttttttctatgctataaatgaattctcattttgcatctgctcatactccgttttatatcaataccaaagaaggaagatatctggttctaaaagccgttaaagtatgcgatgttagaactgtagaatgcgaaggaagtaaagcttcctgcgtactcaaagtagataaaccctcatcgcccgcgtgtgagagaagaccttcgtccccgtccagatgcgagagaatgaataaccctggaaaacaagttccgtttatgaggacggacatgctacaaaatatgttcgcggctaatcgcgataatgtagcttctagacttttgtcctaaaatactattatatccttttcgatattaataaatccgtgtcgtccaggttttttatctctttcagtatgtgaatagataggtattttatctctattcatcatcgaatttaagagatccgataaacattgtttgtattctccagatgtcagcatctgatacaacaatatatgtgcacataaacctctggcacttatttcatgtaccttccccttatcactaaggagaatagtatttgagaaatatgtatacatgatattatcatgaattagatatacagaatttgtaacactctcgaaatcacacgatgtgtcggcgttaagatctaatatatcactcgataacacattttcatctagatacactagacattttttaaagctaaaatagtctttagtagtaacagtaactatgcgattattttcatcgatgatacatttcatcggcatattattacgcttaccatcaaagactataccatgtgtatatctaacgtattctagcatggttgccatacgcgcattaaacttttcaggatctttggatagatcttccaatctatctatttgagaaaacatttttatcatgttcaatagttgaaacgtcggatccactatatagatattatctataaagattttaggaactacgttcatggtatcctggcgaatattaaaactatcaatgatatgattatcgttttcatcttttatcaccatatagtttctaagatatgggattttacttaatataatattatttcccgtgataaattttattagaaaggccaaatctataagaaaagtcctagaattagtctgaagaatatctatatcgccgtatagtatatttggattaattagatatagagaatatgatccgtaacatatacaacttttattatggcgtctaagatattcttccatcaacttattaacatttttgactagggaagatacattatgacgtcccattacttttgccttgtctattactgcgacgttcatagaatttagcatatctcttgccaattcttccattgatgttacattataagaaattttagatgaaattacatttggagctttaatagtaagaactcctaatatgtccgtgtatgtggtcactaatacagattgtagttctataatcgtaaataatttacctatattatatgtttgagtctgtttagaaaagtagctaagtatacgatcttttatttctgatgcagatgtattaacatcggaaaaaaatctttttttattcttttttactaaagatacaaatatgtctttgttaaaaacagttattttctgaatatttctagcttgtaattttaacatatgatattcgttcacactaggtactctgcctaaataggtttctataatctttaatgtaatattaggaaaagtattctgatcaggattcctattcattttgaggatttaaaactctgattattgtctaatatggtctctacgcaaactttttcacagagcgatagagtttttgataactcgtttttcttaagaaatataaaactactgtttccagagctcgctctatcttttattttatctaattcgatacaaactcctgatactggttcagaaagtaattcattaattttcagtcctttatagaagatatttaatatagataatacaaaatcttcagtttttgatatcgatctgattgatcctagaactagatatattaataacgtgctcattaggcagtttatggcagcttgataattagatatagtatattccagttcatatttattagataccgcattgcccagattttgatattctatgaattcctctgaaaataaatccaaaataactagacattctattttttgtggattagtgtactctcttccctctatcatgttcactactggtgtccacgatgataaatatctagagggaatataatatagtccataggatgccaatctagcaatgtcgaataactgtaatttgattcttcgttcttcattatgaattgattcttgaggtataaacctaacacaaattatattattagacttttcgtatgtaatgtctttcatgttataagtttttaatcctggaatagaatctattttaatgaggcttttaaacgcagagttctccaacgagtcaaaacataatactctgttgtttttcttatatacgatgttacgattttcttctttgaatggaataggtttttgaattagtttataattacaacataatagataaggaagtgtgcaaatagtacgcggaaaaaacataatagctcccctgttttcatccatggttttaagtaaatgatcactggcttctttagtcaatggatattcgaacattaaccgtttcatcatcattggacagaatccatatttcttaatgtaaagagtgatcaaatcattgtgtttattgtaccatcttgttgtaaatgtgtattcggttatcggatctgctcctttttctattaaagtatcgatgtcaatctcgtctaagaattcaactatatcgacatatttcatttgtatacacataaccattactaacgtagaatgtataggaagagatgtaacgggaacagggtttgttgattcgcaaactattctaatacataattcttctgttaatacgtcttgcacgtaatctattatagatgccaagatatctatataattattttgtaagatgatgttaactatgtgatctatataagtagtgtaataattcatgtattttgatatatgttccaactctgtctttgtgatgtctagtttcgtaatatctatagcatcctcaaaaaatatattcgcatatattcccaagtcttcagttctatcttctaaaaaatcttcaacgtatggaatataataatctattttacctcttctgatatcattaatgatatagtttttgacactatcttctgtcaattgattcttattcactatatctaagaaacggatagcgtccctaggacgaactactgccattaatatctctattatagcttctggacataattcatctattataccagaattaatgggaactattccgtatctatctaacatagttttaagaaagtcagaatctaagacttgatgttcatatattggttcatacatgaaatgatctctattgatgatagtgactatttcattctctgaaaattggtaactcattctatatatgctttccttgttgatgaaggatagaatatactcaatagaatttgtaccaacaaactgttctcttatgaatcgtatatcatcatctgaaataatcatgtaaggcatacatttaacaattagagacttgtctcctgttatcaatatactattcttgtgataatttatgtgtgaggcaaatttgtccacgttctttaattttgttatagtagatatcaaatccaatggagctacagttcttggcttaaacagatatagtttttctggaacaaattctacaacattattataaaggactttgggtaaataagtgggatgaaatcctattttaattaatgcgatagccttgtcctcgtgcagatatccaaacgcttttgtgatagtatggcattcattgtctagaaacgctctacgaatatctgtgacagatatcatctttagagaatatactagtcgcgttaatagtactacaatttgtattttttaatctatctcaataaaaaaattaatatgtatgattcaatgtataactaaactactaactgttattgataactagaatcagaatctaatgatgacgtacccaagaagtttatctactgccaatttagctgcattatttttagcatctcgtttagattttccatctgccttatcgaatactcttccgtcgatatctacacaggcataaaatgtaggagagttactaggcccaactgattcaatacgaaaagaccaatctctcttagttatttggcagtactcattaataacggtgacagggttagcatctttccaatcaataatttttttagccggaataacatcatcaaaagacttatgatcctctctcattgatttttcgcgggatacatcatctattatgacgtcagccataacatcagcatccggcttatccgcctccgttgtcataaaccaacgaggaggaatatcgtcggagctgtacaccatagcactacgttgaagatcgtacagagctttattaacttctcgcttctccatattaagttgtctagttagttgtgcagcagtagctccttcgattccaatggttttaatagcctcacacacaatctctgcgttagaacgttcgtcgatatagattttagacatttttagagagaactaacacaaccagcaataaaactgaacctactttatcatttttttattcatcatcctctggtggttcgtcgttcctatcaaatgtagctctgattaacccgtcatctataggtgatgctggttctggagattctggaggagatggattattatctggaagaatctctgttatttccttgttttcatgtatcgattgcgttgtaacattaagattgcgaaatgctctaaatttgggaggcttaaagtgttgtttgcaatctctacacgcgtgtctaactagtggaggttcgtcagctgctctagtttgaatcatcatcggcgtagtattcctacttttacagttaggacacggtgtattgtatttctcgtcgagaacgttaaaataatcgttgtaactcacatcctttattttatctatattgtattctactcctttcttaatgcattttataccgaataagagatagcgaaggaattctttttcggtgccgctagtacccttaatcatatcacatagtgttttatattccaaatttgtggcaatagacggtttatttctatacgatagtttgtttctggaatcctttgagtattctataccaatattattctttgattcgaatttagtttcttcgatattagattttgtattacctatattcttgatgtagtactttgatgatttttccatggcccattctattaagtcttccaagttggcatcatccacatattgtgatagtaattctcggatatcagtagcggctaccgccattgatgtttgttcattggatgagtaactactaatgtatacattttccatttataacacttatgtattaactttgttcatttatattttttcattattatgttgatattaacaaaagtgaatatatatatgttaataattgtattgtggttatacggctacaattttataatgagtgaaagtcagtgtccgatgatcaatgacgatagctttactctgaaaagaaagtatcaaatcgatagtgcggagtcaacaataaaaatggataagaagaggataaagtttcagaatagagccaaaatggtaaaagaaataaatcagacaataagagcagcacaaactcattacgagacattgaaactaggatacataaaatttaagagaatgattaggactactactctagaagatatagcaccatctattccaaataatcagaaaacttataaactattctcggacatttcagccatcggcaaagcatcacagaatccgagtaagatggtatatgctctgctgctttacatgtttcccaatttgtttggagatgatcatagattcattcgttatagaatgcatccaatgagtaaaatcaaacacaagatcttctctcctttcaaacttaatcttattagaatattagtggaagaaagattctataataatgaatgcagatctaataaatggaaaataattggaacacaagttgataaaatgttgatagctgaatctgataaatatacaatagatgcaaggtataacctaaaacccatgtatagaatcaagggagaatctgaagaagataccctcttcatcaaacagatggtagaacaatgtgtgacatcccaggaattggtggaaaaagtgttgaagatactgtttagagatttgttcaagagtggagaatacaaagcgtacagatacgatgatgatgtagaaaatggattcattggattggatacactaaaattaaacattgttcatgatatagttgaaccatgtatgcctgttcgtaggccagtggctaagatactgtgtaaagaaatggtaaataaatactttgagaatccgctacatattattggtaaaaatcttcaagagtgcattgactttgttagtgaataggcatttcatctttctccaatactaattcaaattgttaaattaataatggatagtataaatagttattagttataagatagtaaaaataattattagaataagagtgtagtatcatagataactctcttctataaaaatggattttattcgtagaaagtatcttatatacacagtagaaaataatatagattttttaaaggatgatacattaagtaaagtaaacaattttaccctcaatcatgtactagctctcaagtatctagttagcaattttcctcaacatgttattactaaggatgtattagctaataccaatttttttgttttcatacatatggtacgatgttgtaaagtgtacgaagcggttttacgacacgcatttgatgcacccacgttgtacgttaaagcattgactaagaattatttatcgtttagtaacgcaatacaatcgtacaaggaaaccgtgcataaactaacacaagatgaaaaatttttagaggttgccgaatacatggacgaattaggagaacttataggcgtaaattatgacttagttcttaatccattatttcacggaggggaacccatcaaagatatggaaatcatttttttaaaactgtttaagaaaacagacttcaaagttgttaaaaaattaagtgttataagattacttatttgggcatacctaagcaagaaagatacaggcatagagtttgcggataatgatagacaagatatatatactctatttcaacaaactggtagaatcgtccatagcaatctaacagaaacgtttagagattatatctttcccggagataagactagctattgggtgtggttaaacgaaagtatagctaatgatgcggatatcgttcttaatagacccgccattaccatgtatgataaaattcttagttatatatactctgagataaaacaaggacgcgttaataaaaacatgcttaagttagtttatatctttgagcctgaaaaagatatcagagaacttctgctagaaatcatatatgatattcctggagatatcctatctattattgatgcaaaaaacgacgattggaaaaaatattttattagtttttataaagctaattttattaacggtaatacatttattagtgatagaacgtttaacgaggacttattcagagttgttgttcaaatagatcccgaatatttcgataatgaacgaattatgtctttattctctacgagtgctgcggacattaaacgatttgatgagttagatattaataacagttatatatctaatataatttatgaggtgaacgatatcacattagatacaatggatgatatgaagaagtgtcaaatctttaacgaggatacgtcgtattatgttaaggaatacaatacatacctgtttttgcacgagtcggatcccatggtcatagagaacggaatactaaagaaactgtcatctataaaatccaagagtagacggctgaacttgtttagcaaaaacattttaaaatattatttagacggacaattggctcgtctaggtcttgtgttagatgattataaaggagacttgttagttaaaatgataaaccatcttaagtctgtggaggatgtatccgcattcgttcgattttctacagataaaaaccctagtattcttccatcgctaatcaaaactattttagctagttataatatttccatcatcgtcttatttcaaaggtttttgagagataatctatatcatgtagaagaattcttggataaaagcatccatctaaccaagacggataagaaatatatacttcaattgataagacacggtagatcatagaacagaccaaatatattattaataatttgtatatacatagatataattatcacacatttttgataaatgggaactgctgcaacaattcagactcccaccaaattaatgaataaagaaaatgcagaaatgattttggaaaaaattgttgatcatatagttatgtatattagtgacgaatcaagtgattcagaaaataatcctgaatatattgattttcgtaacagatacgaagactatagatctctcattataaaaagtgatcacgagtttgtaaagctatgtaaaaatcatgcggagaaaagttctccagaaacgcaacaaatgattatcaaacacatatacgaacaatatcttattccagtatctgaagtactattaaaacctataatgtccatgggtgacataattacatataacggatgtaaagacaatgaatggatgctagaacaactctctaccctaaactttaacaatctccgcacatggaactcatgtagcataggcaatgtaacgcgtctgttttatacattttttagttatctgatgaaagataaactaaatatataagtataatcccattctaatactttaacctgatgtattagcatcttattagaatattaacctaactaaaagacataacataaaaactcattacatagttgataaaaagcggtaggatataaatattatggctgccaccgttccgcgttttgacgacgtgtacaaaaatgcacaaagaagaattctagatcaagaaacattttttagtagaggtctaagtagaccgttaatgaaaaacacatatctatttgataattacgcgtatggatggataccagaaactgcaatttggagtagtagatacgcaaacttagatgcaagtgactattatcccatttcgttgggattacttaaaaagttcgagtttctcatgtctctatataaaggtcctattccagtatacgaagaaaaagtaaatactgaattcattgctaatggatctttctccggtagatacgtatcatatcttagaaagttttctgctcttccaacaaacgagtttattagttttttgttactgacttccattccaatctataatatcttgttctggtttaaaaatactcagtttgatattactaaacacacattattcagatacgtctatacagataatgccaaacacctggcgttggctaggtatatgtatcaaacaggagactataagcctttgtttagtcgtctcaaagagaattatatatttaccggtcccgttccaatatgtatcaaagatatagatcaccctaatcttagtagagcaagaagtccatccgattatgagacattagctaatattagtactatattgtactttaccaagtatgatccggtattaatgtttttattgttttacgtacctgggtattcaattactacaaaaattactccagccgtagaatatctaatggataaactgaatctaacaaagagcgacgtacaactgttgtaaattattttatgcttcgtaaaatgtaggttttgaaccaaacattctttcaaagaatgagatgcataaaactttattatccaatagattgactatttcggacgtcaatcgtttaaagtaaacttcgtaaaatattctttgatcactgccgagtttaaaacttctatcgataattgtttcatatgttttaatatttacaagttttttggtccatggtccattaggacaaatatatgcaaaataatatcgttctccaagttctatagtctctggattatttttattatattcagtaaccaaatacatattagggttatctgcggatttataatttgagtgatgcattcgactcaacataaataattctagaggagacgatctactatcaaattcggatcgtaaatctgtttctaaagaacggagaatatctatacatacctgattagaattcatccgtccttcagacaacatctcagacagtctggttttgtacatcttaatcatattcttatgaaacttggaaacatctcttctagtttcactagtacctttattaattctctcaggtacagattttgaattcgacgatgctgagtatttcatcgttgtatatttcttcttcgattgcataatcagattcttatataccgcctcaaactctattttaaaattattaaacaatactctattattaatcagtcgttctaactctttcgctatttctatagacttatctacatcttgactgtctatctctgtaaacacggagtcggtatctccatacacgctacgaaaacgaaatctgtaatctataggcaacgatgttttcacaatcggattaatatctctatcgtccatataaaatggattacttaatggattggcaaaccgtaacataccgttagataactctgctccatttagtaccgattctagatacaagatcattctacgtcctatggatgtgcaactcttagccgaagcgtatgagtatagagcactatttctaaatcccatcagaccatatactgagttggctactatcttgtacgtatattgcatggaatcatagatggccttttcagttgaactggtagcctgttttagcatctttttatatctggctctctctgccaaaaatgttcttaatagtctaggaatggttccttctatcgatctatcgaaaattgctatttcagagatgaggttcggtagtctaggttcacaatgaaccgtaatatatctaggaggtggatatttctgaagcaatagctgattatttatttcttcttccaatctattggtactaacaacgacaccgactaatgtttccggagatagatttccaaagatacacacattaggatacagactgttataatcaaagattaatacattattactaaacattttttgttttggagcaaataccttaccgccttcataaggaaacttttgttttgtttctgatctaactaagatagttttagtttccaacaatagctttaacagtggacccttgatgactgtactcgctctatattcgaataccatggattgaggaagcacatatgttgacgcacccgcgtctgtttttgtttctactccataatactcccacaaatactgacacaaacaagcatcatgaatacagtatctagccatatctaaagctatgtttagattataatccttatacatctgagctaaatcaacgtcatcctttccgaaagataatttatatgtatcattaggtaaagtaggacataatagtacgactttaaatccattttcccaaatatctttacgaattactttacatataatatcctcatcaacagtcacataattacctgtggttaaaacctttgcaaatgcagcggctttgcctttcgcgtctgtagtatcgtcaccgatgaacgtcatttctctaactcctctatttaatactttacccatgcaactgaacgcgttcttggatatagaatccaatttgtacgaatccaatttttcaaatttttgaatgaatgaatatagatcgaaaaatatagttccattattgttattaacgtgaaacgtagtattggccatgccgcctactcccttatgactagactgatttctctcataaatacagagatgtacagcttcctttttgtccggagatctaaagataattttctctcctgttaataactctagacgattagtaatatatctcagatcaaagttatgtccgttaaaggtaacgacgtagtcgaacgttagttccaacaattgtttagctattcgtaacaaaactatttcagaacatagaactagttctcgttcgtaatccatttccattagtgactgtatcctcaaacatcctctatcgacggcttcttgtatttcctgttccgttaacatctcttcattaatgagcgtaaacaataatcgtttaccacttaaatcgatataacagtaacttgtatgcgagattgggttaataaatacagaaggaaacttcttatcgaagtgacactctatatctagaaataagtacgatcttgggatatcgaatctaggtatttttttagcgaaacagttacgtggatcgtcacaatgataacatccattgttaatctttgtcaaatattgctcgtccaacgagtaacatccgtctggagatatcccgttagaaatataaaaccaactaatattgagaaattcatccatggtggcattttgtatgctgcgtttctttggctcttctatcaaccacatatctgcgacggagcattttctatctttaatatctagattataacttattgtctcgtcaatgtctatagttctcatctttcccaacggcctcgcattaaatggaggaggagacaatgactgatatatttcgtccgtcactacgtaataaaagtaatgaggaaatcgtataaatacggtctcaccatttcgacatctggatttcagatataaaaatctgttttcaccgtgactttcaaaccaattaatgcaccgaacatccatttatagaatttagaaatatattttcatttaaatgaatcccaaacattggggaagagccgtatggaccattatttttatagtactttcgcaagcgggtttagacggcaacatagaagcgtgtaaacgaaaactatatactatagttagcactcttccatgtcctgcatgtagacggcacgcgactatcgctatagaggacaataatgtcatgtctagcgatgatctgaattatatttattattttttcatcagattatttaacaatttggcatctgatcccaaatacgcgatcgatgtgacaaaggttaaccctttataaacttaacccattataaaacttatgattagtcacaactgaaataaccgcgtgattattttttggtataattctacacggcatggtttctgtgactatgaattcaacccccgttacattagtgaaatctttaacaaacagcaagggttcgtcaaagacataaaactcattgtttacaatcgaaatagaccccctatcacacttaaaataaaaaatatccttatcctttaccaccaaataaaattctgattggtcaatgtgaatgtattcacttaacagttccacaaatttatttattaactccgaggcacatacatcgtcggtattttttatggcaaactttactcttccagcatccgtttctaaaaaaatattaacgagttccatttatatcatccaatattattgaaatgacgttgatggacagatgatacaaataagaaggtacggtacctttgtccaccatctcctccaattcatgctctattttgtcattaactttaatgtatgaaaacagtacgccacatgcttccatgacagtgtgtaacactttggatacaaaatgtttgacattagtataattgttcaagactgtcaatctataatagatagtagctataatatattctatgatggtattgaagaagatgacaaccttggcatattgatcatttaacacagacatggtatcaacagatagcttgaatgaaagagaatcagtaattggaataagcgtcttctcgatagagtgtccgtataccaacatgtctgatattttgatgtattccattaaattatttagttttttctttttattctcgttaaacagcatttctgtcaacggaccccaacatcgttgaccgattaagttttgattgatttttccgtgtaaggcgtatctagtcagatcgtatagcctatccaataatccatcatctgtgcgtagatcacatcgtacactttttaattctctatagaagagcgacagacatctggagcaattacagacagcaatttctttattctctacagatgtaagatacttgaagacattcctatgatgatgcagaattttggataacacggtattgatggtatctgttaccataattcctttgatggctgatagtgtcagagcacaagatttccaatctttgacaatttttagcaccattatctttgttttgatatctatatcagacagcatggtgcgtctgacaacacagggattaagacggaaagatgaaatgattctctcaacatcttcaatagataccttgctattttttctggcattatctatatgtgcgagaatatcctctagagaatcagtatcctttttgatgatagtggatctcaatgacatgggacgtctaaaccttcttattctatcaccagattgcatggtgatttgtcttctttcttttatcataatgtaatctctaaattcatcggcaaattgtctatatctaaaatcataatatgagatgtttacctctacaaatatctgttcgtccaatgttagagtatttacatcagttttgtattccaaattaaacatggcaacggatttaattttatattcctctattaagtcctcgtcgataataacagaatgtagataatcatttaatccatcgtacatggttggaagatgcttgttgacaaaatctttaattgtcttgatgaaggtgggactatatctaacatcttgattaataaaatttataacattgtccataggatactttgtaactagttttatacacatctcttcatcggtaagtttagacagaatatcgtgaacaggtggtatattatattcatcagatatacgaagaacaatgtccaaatctatattgtttaatatattatataaatgtagcgtagctcctacaggaatatctttaactaagtcaatgatttcatcaaccgttagatctattttaaagttaatcatataggcattgatttttaaaaggtatgtagccttgactacattctcattaattaaccattccaagtcactgtgtgtaagaagattatattctatcataagcttgactacatttggtcccgataccattaaagaattcttatgatataaggaaacagcttttaggtactcatctactctacaagaattttggagagccttaacgatatcagtgacgtttattatttcaggaggaaaaaacctaacattgagaatatcggaattaatagcttccagatacagtgattttggcaatagtccgtgtaatccataatccagtaacacgagctggtgcttgctagacaccttttcaatgtttaatttttttgaaataagctttgataaagccttcctcgcaaattccggatacatgaacatgtcggcgacatgattaagtattgttttttcattattttctcaataccccaatagatgatagaatatcacccaatgcgtccatgttgtctatttccaacaggtcgctatatccaccaatagaagtttttccaaaaaagattctaggaacagttctaccaccagtaatttgttcaaaatagtcacgcaattcattttcgggtttaaattctttaatatcgacaatttcatacgctcctcttttgaaactaaacttatttagaatatccagtgcatttctacaaaaaggacatgtatacttgacaaaaattgtcactttgttattggccaacctttgttgtacaaattcctcggccattttaatatttaagtgatataaaactatctcgacttatttaactctttagtcgagatatatggacgcagatagctatatgatagccaactacagaaggcaaacgctataaaaaacataattacgacgagcatatttataaatatttttattcagcattacttgatatagtaatattaggcacagtcaaacattcaaccactctcgatacattaactctctcattttctttaacaaattctgcaatatcttcgtaaaaagattcttgaaactttttagaatatctatcgactctagatgaaatagcgttcgtcaacatactatgttttgtatacataaaggcgcctattttaacagtttctagtgacaaaatgctagcgatcctaggatcctttagaatcacatagattgacgattcgtctctcttagtaactctagtaaaataatcatacaatctagtacgcgaaataatattatccttgacttgaggagatctaaacaatctagttttgagaacatcgataagttcatcgggaatgacatacatactatctttaatagaactcttttcatccagttgaatggattcgtccttaaccaactgattaatgagatcttctattttatcattttccagatgatatgtatgtccattaaagttaaattgtgtagcgcttttttttagtctagcagccaatactttaacatcactaatatcgatatacaaaggagatgatttatctatggtattaagaattcgtttttcgacatccgtcaaaaccaattcctttttgcctgtatcatccagttttccatcctttgtaaagaaattattttctactagactattaataagactgataaggattcctccataattgcacaatccaaactttttcacaaaactagactttacaagatctacaggaatgcgtacttcaggtttcttagcttgtgattttttcttttgcggacattttctagtaaccaactcatctaccatttcattgattttagcagtgaaataagctttcaatgcacgggcactgatactattgaaaacgagttgatcttcaaattccgccatttaagttcaccaaacaacttttaaatacaaatatatcaatagtagtagaataagaactataaaaaaaataataattaaccaataccaaccccaacaaccggtattattagttgatgtgactgttttctcatcacttagaacagatttaacaatttctataaagtctgtcaaatcatcttccggagaccccataaatacaccaaatatagcggcgtacaacttatccatttatacattgaatattggcttttctttatcgctatcttcatcatattcatcatcaatatcaacaagtcccagattacgagccagatcttcttctacattttcagtcattgatacacgttcactatctccagagagtccgataacgttagccaccacttctctatcaatgattagtttcttgagcgcgaaagtaatttttgtttccgttccggatctatagaagacgataggtgtgataattgccttggccaattgtctttctcttttactgagtgattctagttcaccttctatagatctgagaatggatgattctccagtcgaaacatattctaccatggatccgtttaatttgttgatgaagatggattcatccttaaatgttttctctgtaatagtttccaccgaaagactatgcaaagaatttggaatgcgttccttgtgcttaatgtttccatagacggcttctagaagttgatacaacataggactagccgcggtaacttttatttttagaaagtatccatcgcttctatcttgtttagatttatttttataaagtttagtctctccttccaacataataaaagtggaagtcatttgactagataaactatcagtaagttttatagagatagacgaacaattagcgtattgagaagcatttagtgtaacgtattcgatacattttgcattagatttactaatcgattttgcatactctataacacccgcacaagtctgtagagaatcgctagatgcagtaggtcttggtgaagtttcaactctcttcttgattaccttactcatgattaaacctaaataattgtactttgtaatataatgatatatattttcactttatctcatttgagaataaaaatgtttttgtttaaccactgcatgatgtacagatttcggaatcgcaaaccaccagtggttttattttatccttgtccaatgtgaattgaatgggagcggatgcgggtttcgtacgtagatagtacattcccgtttttagaccgagactccatccgtaaaaatgcatactcgttagtttggaataactcggatctgctatatggatattcatagattgactttgatcgatgaaggctcccctgtctgcagccatttttatgatcgtcttttgtggaatttcccaaatagttttataaactcgcttaatatcttctggaaggtttgtattctgaatggatccaccatctgccataatcctattcttgatctcatcattccataattttctctcggttaaaactctaaggagatgcggattaactacttgaaattctccagacaatactctccgagtgtaaatattactggtatacggttccaccgactcattatttcccaaaatttgagcagttgatgcagtcggcataggtgccaccaataaactatttctaagaccgtatgttctgattttatcttttagaggttcccaattccaaagatccgacggtacaacattccaaagatcatattgtagaataccgttactggcgtacgatcctacatatgtatcgtatggtccttccttctcagctagttcacaactcgcctctaatgcaccgtaataaatggtttcgaagatcttcttatttagatcttgtgcttccaggctatcaaatggataatttaagagaataaacgcgtccgctaatccttgaacaccaataccgataggtctatgtctcttattagagatttcagcttctggaataggataataattaatatctataattttattgagatttctgacaattactttgaccacatccttcagtttgagaaaatcaaatcgcccatctattacaaacatgttcaaggcaacagatgccagattacaaacggctacctcattagcatccgcatattgtattatctcagtgcaaagattactacacttgatagttcctaaattttgttgattactctttttgttacacgcatccttataaagaatgaatggagtaccagtttcaatctgagattctataatcgctttccagacgactcgagcctttattatagatttgtatctcctttctctttcgtatagtgtatacaatcgttcgaactcgtctccccaaacattgtccaatccaggacattcatccggacacatcaacgaccactctccgtcatccttcactcgtttcataaagagatcaggaatccaaagagctataaatagatctctggttctatgttcctcgtttcctgtattctttttaagatcgaggaacgccataatatcagaatgccacggttccaagtatatggccataactccaggccgtttgtttcctccctgatctatgtatctagcggtgttattataaactctcaacattggaataataccgtttgatataccattggtaccggagatatagcttccactggcacgaatattactaattgatagacctattccccctgccattttagagattaatgcgcatcgttttaacgtgtcatagataccctctatgctatcatcgatcatgttaagtagaaaacagctagacatttggtgacgactagttcccgcattaaataaggtaggagaagcgtgcgtaaaccatttttcagaaagtagattgtacgtctcaatagctgagtctatatcccattgatgaattcctactgcgacacgcattaacatgtgctgaggtctttcaacgatcttgttgtttattttcaacaagtaggatttttccaaagttttaaaaccaaaatagttgtatgaaaagtctcgttcgtaaataataaccgagttgagtttatccttatatttgttaactatatccatggtgatacttgaaataatcggagaatgtttcccatttttaggattaacatagttgaataaatcctccatcacttcactaaatagtttttttgtttccttgtgtagatttgatacggctattctggcggctagaatggcataatccggatgttgtgtagtacaagtggctgctatttcggctgccagagtgtccaattctaccgttgttactccattatatattccttgaataaccttcatagctattttaataggatctatatgatccgtgtttaagccataacataattttctaatacgagacgtgattttatcaaacatgacattttccttgtatccatttcgtttaatgacaaacatttttgttggtgtaataaaaaaattatttaacttttcattaatagggatttgacgtatgtagcgtacaaaattatcgttcctggtatatagataaagagtcctatatatttgaaaatcgttacggctcgattaaactttaatgattgcatagtgaatatatcattaggatttaactccttgactatcatggcggcgccagaaattaccatcaaaagcattaatacagttatgccgatcgcagttagaacggttatagcatccaccatttatatctaaaaattagatcaaagaatatgtgacaaagtcctagttgtatactgagaattgacgaaacaatgtttcttacatatttttttcttattagtaactgacttaatagtaggaactggaaagctagacttgattattctataagtatagatacccttccagataatgttctctttgataaaagttccagaaaatgtagaattttttaaaaagttatcttttgctattaccaagattgtgtttagacgcttattattaatatgagtgatgaaatccacaccgcctctagatatcgcctttatttccacattagatggtaaatccaatagtgaaactatctttttaggaatgtatggactcgcgtttagaggagtgaacgtcttaggcgtcggaaaggatgattcatcaaacgaataaacaatttcacaaatggatgttaatgtattagtaggaaattttttgacgctagtggaattgaagattctaatggatgatgttctacctatttcatccgataacatgttaatttccgacaccaacggttttaatatttcgatgatatacggtagtctctctttcggacttatatagcttattccacaatacgagtcattatatactccaaaaaacaaaataactagtataaaatctgtatcgaatgggaaaaacgaaattatcgacataggtatagaatccggaacattgaacgtattaatacttaattctttttctgtggtaagtactgataggttattgacattgtatggttttaaatattctataacttgagacttgatagatattagtgatgaattgaaaattatttttatcaccacgtgtgtttcaggatcatcgtcgacgcccgtcaaccaaccgaacggagtaaaataaatatcattaatatatgctctaaatattagtatttttatcaatcctttgattatcatcttctcgtaggcgaatgattccatgatcaagagtgatttgagaacatcctccggagtattaatgggcttagtaaacagtccatcgttgcaataataaaagttatccaagttaaaggatattatgcattcgtttaaagatatcacctcatctgacggagacaattttttggtaggttttagagactttgaagctacttgtttaacaaagttattcatcgtcgtctactattctatttaattttgtagttaatttatcacatatcacattaattgactttttggtccacttttccatacgtttatattcttttaatcctgcgttatccgtttccgttatatccagggatagatcttgcaagttaaatagaatgctcttaaataatgtcattttcttatccgctaaaaatttaaagaatgtataaacctttttcagagatttgaaactcttaggtggtgtcctagtacacaatatcataaacaaactaataaacattccacattcagattccaacagctgattaacttccacattaatacagcctattttcgctccaaatgtacattcgaaaaatctgaataaaacatcgatgtcacaatttgtattatccaatacagaatgtttgtgattcgtgttaaaaccatcggagaaggaatagaaataaaaattattatagtggtggaattcagttggaatattgcctccggagtcataaaaggatactaaacattgttttttatcataaattacacatttccaatgagacaaataacaaaatccaaacattacaaatctagaggtagaacttttaattttgtctttaagtatatacgataagatatgtttattcataaacgcgtcaaatttttcatgaatcgctaaggagtttaagaatctcatgtcaaattgtcctatataatccacttcggatccataagcaaactgagagactaagttcttaatacttcgattgctcatccaggctcctctctcaggctctattttcatcttgacgacctttggattttcaccagtatgtattcctttacgtgataaatcatcgattttcaaatccatttgtgagaagtctatcgccttagatactttttcccgtagtcgaggtttaaaaaaatacgctaacggtatactagtaggtaactcaaagacatcatatatagaatggtaacgcgtctttaactcgtcggttaactctttcttttgatcgagttcgtcgctactattgggtctgctcaggtgccccgactctactagttccaacatcataccgataggaatacaagacactttgccggcggttgtagatttatcatatttttccactacatatccgttacaatttgttaaaaatttagatacatctatattgctacataatccagctagtgaatatatatgacataataaattggtaaatcctagttctggtattttactaattactaaatctgtatatctttccatttatcatggaaaagaatttaccagatatcttcttttttccaaactgcgttaatgtattctcttacaaatattcacaagatgaattcagtaatatgagtaaaacggaacgtgatagtttctcattggccgtgtttccagttataaaacatagatggcataacgcacacgttgtaaaacataaaggaatatacaaagttagtacagaagcacgtggaaaaaaagtatctcctccatcactaggaaaacccgcacacataaacctaaccgcgaagcaatatatatacagtgaacacacaataagctttgaatgttatagttttctaaaatgtataacaaatacagaaatcaattcgttcgatgagtatatattaagaggactattagaagctggtaatagtttacagatattttccaattccgtaggtaaacgaacagatactataggtgtactagggaataagtatccatttagcaaaattccattggcctcattaactcctaaagcacaacgagagatattttcagcgtggatttctcatagacctgtagttttaactggaggaactggagtgggtaagacgtcacaggtacccaagttattgctttggtttaattatttatttggtggattctctactctagataaaatcactgactttcacgaaagaccagtcattctatctcttcctaggatagctttagttagattgcatagcaataccattttaaaatcattgggatttaaggtactagatggatctcctatttctttacggtacggatctataccggaagaattaataaacaaacaaccaaaaaaatatggaattgtattttctacccataagttatctctaacaaaactatttagttatggcactcttattatagacgaagttcatgagcatgatcaaataggagatattattatagcagtagcgagaaagcatcatacgaaaatagattctatgtttttaatgactgccacgttagaggatgacagggaacggctaaaagtatttttacctaatcccgcatttatacatattcctggagatacactgtttaaaattagcgaggtatttattcataataagataaatccatcttccagaatggcatacatagaagaagaaaagagaaatttagttactgctatacagatgtatactcctcctgatggatcatccggtatagtctttgtggcatccgttgcacagtgtcacgaatataaatcatatttagaaaaaagattaccgtatgatatgtatattattcatggtaaggtcttagatatagacgaaatattagaaaaagtgtattcatcacctaatgtatcgataattatttctactccttatttggaatccagcgttactatacgcaatgttacacacatttatgatatgggtagagtttttgtccccgctccttttggaggatcgcaacaatttatttctaaatctatgagagatcaacgaaaaggaagagtaggaagagttaatcctggtacatacgtctatttctatgatctgtcttatatgaagtctatacagcgaatagattcagaatttctacataattatatattgtacgctaataagtttaatctaacactccccgaagatttgtttataatccctacaaatttggatattctatggcgtacaaaggaatatatagactcgttcgatattagtacagaaacatggaataaattattatccaattattatatgaagatgatagagtatgctaaactttatgtactaagtcctattctcgctgaggagttggataactttgagaggacgggagaattaactagtattgtacgagaagccattttatctctaaatttacaaattaagattttaaattttaaacataaagatgatgatacgtatatacacttttgtaaaatattattcggtgtctataacggaacaaacgctactatatattatcatagacctctaacgggatatatgaatatgatttcagatactatatttgttcctgtagataataactaaaaatcaaactctaatgaccacatctttttttagagatgaaaaattttccacatctccttttgtagacacgactaaacattttgcagaaaaaagtttattagtgtttagataatcgtatacttcatcagtgtagatagtaaatgtgaacagataaaaggtattcttgctcaatagattggtaaattccatagaatatattaatcctttcttcttgagatcccacatcatttcaaccagagacgttttatccaatgatttacctcgtactataccacatacaaaactagattttgcagtgacgtcgtacctggtattcctaccaaacaaaattttacttttagttcttttagaaaattctaaggtagaatctctatttgccaatatgtcatctatggaattaccactagcaaaaaatgatagaaatatatattgatacatcgcagctggttttgatctactatactttaaaaacgaatcagattccataattgcctgtatatcatcagctgaaaaactatgttttacacgtattccttcggcatttctttttaatgatatatcttgtttagacaatgataaagttatcatgtccatgagagacgcgtctccgtatcgtataaatatttcattagatgttagacgcttcattaggggtatacttctataaggtttcttaatcagtccatcattggttgcgtcaagaactactatcggatgttgttgggtatctctagtgttacacatggccttactaaagtttgggtaaataactatgatatctctattaattatagatgcatatatttcattcgtcaaggatattagtatcgacttgctatcgtcattaatacgtgtaatgtaatcatataaatcatgcgatagccaaggaaaatttaaatagatgttcatcatataatcgtcgctataattcatattaatacgttgacattgactaatttgtaatatagcctcgccacgaagaaagctctcgtattcagtttcatcgataaaggataccgttaaatataactggttgccgatagtctcatagtctattaagtggtaagtttcgtacaaatacagaatccctaaaatattatctaatgttggattaatctttaccataactgtataaaatggagacggagtcataactattttaccgtttgtacttactggaatagatgaaggaataatctccggacatgctggtaaagacccaaatgtctgtttgaagaaatccaatgttccaggtcctaatctcttaacaaaaattacgatattcgatcccgatatcctttgcattctatttaccagcatatcacgaactatattaagattatctatcatgtctattctcccaccgttatataaatcgcctccgctaagaaacgttagtatatccatacaatggaatacttcatttctaaaatagtattcgttttctaattctttaatgtgaaatcgtatactagaaagggaaaaattatctttgagttttccgttagaaaagaaccacgaaactaatgttctgattgcgtccgattccgttgctgaattaatggatttacaccaaaaactcatataacttctagatgtagaagcattcgctaaaaaattagtagaatcaaaggatataagtagatgttccaacaagtgagcaattcccaagatttcatctatatcattctcgaatccgaaattagaaattcccaagtagatatcctttttcatccgatcgttgatgaaaatacgaactttattcggtaagacaatcatttactaaggagtaaaataggaagtaatgttcgtatgtcgttatcatcgtataaattaaaggtgtgttttttaccattaagtgacattataattttaccaatattggaattataatataggtgtatttgcgcactcgcgacggttgatgcatcggtaaatatagctgtatctaatgttctagtcggtatttcatcatttcgctgtctaataatagcgttttctctatctgtttccattacagctgcctgaagtttattggtcggataatatgtaaaataataagaaatacatacgaataacaaaaataaaataagatataataaagatgccatttagagatctaattttgtttaacttgtccaaattcctacttacagaagatgaggaatcgttggagatagtgtcttccttatgtagaggatttgaaatatcttataatgacttgataacttactttccagataggaaataccataaatatatttataaagtatttgaacatgtagatttatcggaggaattaagtatggaattccatgatacaactctgagagatttagtctatcttagattgtacaagtattccaagtgtatacggccgtgttataaattaggagataatctaaaaggcatagttgttataaaggacaggaatatttatattagggaagcaaatgatgacttgatagaatatctcctcaaggaatacactcctcagatttatacatattctaatgagcgcgtccccataactggttcaaaattaattctttgtggattttctcaagttacatttatggcgtatacaacgtcgcatataacaacaaataaaaaggtagatgttctcgtttccaaaaaatgtatagatgaactagtcgatccaataaattatcaaatacttcaaaatttatttgataaaggaagcggaacaataaacaaaatactcaggaagatattttattcggtaacaggtggccaaactccataggtagctttttctatttcggattttagaatttccaaattcaccagcgatttatcggttttggtgaaatccaaggatttattaatgtccacaaatgccatttgttttgtctgtggattgtatttgaaaatggaaacgatgtagttagatagatgcgctgcgaagtttcctattagggttccgcgcttcacgtcacccagcatacttgaatcaccatcctttaaaaaaaatgataagatatcaacatggagtatatcatactcggattttaattcttctactgcatcactgacattttcacaaatactacaatacggtttaccgaaaataatcagtacgttcttcatttatgggtatcaaaaacttaaaatcgttactgctggaaaataaatcactgacgatattagatgataatttatacaaagtatacaatggaatatttgtggatacaatgagtatttatatagccgtcgccaattgtgtcagaaacttagaagagttaactacggtattcataaaatacgtaaacggatgggtaaaaaagggagggcatgtaaccctttttatcgatagaggaagtataaaaattaaacaagacgttagagacaagagacgtaaatattctaaattaaccaaggacagaaaaatgttagaattagaaaagtgtacatccgaaatacaaaatgttaccggatttatggaagaagaaataaaggcagaaatgcaattaaaaatcgataaactcacatttcaaatatatttatctgattctgataacataaaaatatcattgaatgagatactaacacatttcaacaataatgagaatgttacattattttattgtgatgaacgagacgcagaattcgttatgtgtctcgaggctaaaacacatttctctaccacaggagaatggccgttgataataagtaccgatcaggatactatgctatttgcatctgctgataatcatcctaagatgataaaaaacttaactcaactgtttaaatttgttccctcggcagaggataactatttagcaaaattaacggcgttagtgaatggatgtgatttctttcctggactctatggggcatctataacacccaccaacttaaacaaaatacaattgtttagtgattttacaatcgataatatagtcactagtttggcaattaaaaattattatagaaagactaactctaccgtagacgtgcgtaatattgttacgtttataaacgattacgctaatttagacgatgtctactcgtatattcctccttgtcaatgcactgttcaagaatttatattttccgcattagatgaaaaatggaatgaatttaaatcatcttatttagaaagcgtgccgttaccctgccaattaatgtacgcgttagaaccacgcaaggagattgatgtttcagaagttaaaactttatcatcttatatagatttcgaaaatactaaatcagatatcgatgttataaaatctatatcctcgatcttcggatattctaacgaaaactgtaacacgatagtattcggcatctataaggataatttactactgagtataaataattcattttactttaacgatagtctgttaataaccaatactaaaagtgataatataataaatataggttactagattaaaaatggtgttccaactcgtgtgctctacatgcggtaaagatatttctcacgaacgatataaattgattatacgaaaaaaatcattaaaggatgtactcgtcagtgtaaagaacgaatgttgtaggttaaaattatctacacaaatagaacctcaacgtaacttaacagtgcaacctctattggatataaactaatatggatccggttaattttatcaagacatatgcgcctagaggttctattatttttattaattataccatgtcattaacaagtcatttgaatccatcgatagaaaaacatgtgggtatttattatggtacgttattatcggaacacttggtagttgaatctacctatagaaaaggagttcgaatagtcccattggatagtttttttgaaggatatcttagtgcaaaagtatacatgttagagaatattcaagttatgaaaatagcagctgatacgtcattaactttattgggtattccgtatggatttggtcataatagaatgtattgttttaaattggtagctgactgttataaaaatgccggtattgatacatcgtctaaacgaatattgggcaaagatatttttctgagccaaaacttcacagacgataatagatggataaagatatatgattctaataatttaacattttggcaaattgattaccttaaagggtgagttaatatgcataactactcctccgttgttttttccctcgttctttttcttaacgttgtttgccatcactctcataatgtaaagatattctaaaatggtaaacttttgcatatcggacgcagaaattggtataaatgttgtaattgtattatttcccgtcaatggactagtcacagctccatcagttttatatcctttagagtatttctcactcgtgtctaacattctagagcattccatgatctgtttatcgttgatattggccggaaagatagattttttattttttattatattactattggcaattgtagatataacttctggtaaatatttttctaccttttcaatctcttctattttcaagccggctatatattctgctatattgttgctagtatcaataccttttctggctaagaagtcatatgtggtattcactatatcagttttaactggtagttccattagcctttccacttctgcagaataatcagaaattggttctttaccagaaaatccagctactataataggctcaccgatgatcattggcaaaatcctatattgtaccagattaatgagagcatatttcatttccaataattctgctagttcttgagacattgatttatttgatgaatctagttggttctctagatactctaccatttctgccgcatacaataacttgttagataaaatcagggttatcaaagtgtttagcgtggctagaatagtgggcttgcatgtattaaagaatgcggtagtatgagtaaaccgttttaacgaattatatagtctccagaaatctgtggcgttacatacatgagccgaatgacatcgaagattgtccaatatttttaatagctgctctttgtccattatttctatatttgactcgcaacaattgtagataccattaatcaccgattcctttttcgatgccggacaatagcacaattgtttagctttggactctatgtattcagaattaatagatatatctctcaatacagattgcactatacattttgaaactatgtcaaaaattgtagaacgacgctgttctgcagccatttaactttaaataatttacaaaaatttaaaatgagcatccgtataaaaatcgataaactgcgccaaattgtggcatatttttcagagttcagtgaagaagtgtctataaatgtagactcgacggatgagttaatgtatatttttgccgccttgggcggatctgtaaacatttgggccattatacctctcagtgcatcagtgttttaccgaggagccgaaaacattgtgtttaatcttccggtgtccaaggtaaaatcgtgtttgtgtagttttcacaatgatgccatcatagatatagaacctgatctggaaaataatctagtaaaactttctagttatcatgtagtaagtgtcgattgtaataaggaactgatgcctattaggacagatactactatttgtctaagtatagatcaaaagaaatcttacgtgtttaattttcacaagtatgaagaaaaatgttgtggtagaaccgtcattcatttagaatggttgttgggctttatcaagtgtattagtcagcatcagcatttggctattatgtttaaagatgacaatattattatgaagactcctggtaatactgatgcattttccagggaatattctatgactgaatgttctcaagaactacaaaagttttctttcaaaatagctatctcgtctctcaacaaactacgaggattcaaaaagagagtcaatgtttttgaaactagaatcgtaatggataatgacgataacattttaggaatgttgttttcggatagagttcaatcctttaagatcaacatctttatggcgtttttagattaatactttcaatgagataaatatgggtggcggagtaagtgttgagctccctaaacgggatccgcctccgggagtacccactgatgagatgttattaaacgtggataaaatgcatgacgtgatagctcccgctaagcttttagaatatgtgcatataggaccactagcaaaagataaagaggataaagtaaagaaaagatatccagagtttagattagttaacacaggacccggtggtctttcggcattgttaagacaatcgtataatggaaccgcacccaattgctgtcgcacttttaatcgtactcattattggaagaaggatggaaagatatcagataagtatgaagagggtgcagtattagaatcgtgttggccagacgttcacgacactggaaaatgcgatgttgatttattcgactggtgtcagggggatacgttcgatagaaacatatgccatcagtggatcggttcagcctttaataggagtaatagaactgtagagggtcaacaatcgttaataaatctgtataataagatgcaaacattatgtagtaaagatgctagtgtaccaatatgcgaatcatttttgcattatttacgcgcacacaatacagaagatagcaaagagatgatcgattatattctaagacaacagtctgcggactttaaacagaaatatatgagatgtagttatcccactagagataagttagaagagtcattaaaatatgcggaacctcgagaatgttgggatccagagtgttcgaatgccaatgttaatttcttactaacacgtaattataataatttaggactttgcaatattgtacgatgtaatactagcgtgaacaacttacagatggataaaacttcctcattaagattgtcatgtggattaagcaatagtgatagattttctactgttcccgtcaatagagcaaaagtagttcaacataatattaaacactcgttcgacctaaaattgcatttgatcagtttattatctctcttggtaatatggatactaattgtagctatttaaatgggtgccgcggcaagcatacagacgacggtgaatacactcagcgaacgtatctcgtctaaattagaacaagaagcgaacgctagtgctcaaacaaaatgtgatatagaaatcggaaatttttatatccgacaaaaccatggatgtaacctcactgttaaaaatatgtgctctgcggacgcggatgctcagttggatgctgtgttatcagccgctacagaaacatatagtggattaacaccggaacaaaaagcatacgtgccagctatgtttactgctgcgttaaacattcagacgagtgtaaacactgttgttagagattttgaaaattatgtgaaacagacttgtaattctagcgcggtcgtcgataacaaattaaagatacaaaacgtaatcatagatgaatgttacggagccccaggatctccaacaaatttggaatttattaatacaggatctagcaaaggaaattgtgccattaaggcgttgatgcaattgactactaaggccactactcaaatagcacctaaacaagttgctggtacaggagttcagttttatatgattgttatcggtgttataatattggcagcgttgtttatgtactatgccaagcgtatgttgttcacatccaccaatgataaaatcaaacttattttagccaataaggaaaacgtccattggactacttacatggacacattctttagaacttctccgatggttattgctaccacggatatgcaaaactgaaaatatattgataatattttaatagattaacatggaagttatcgctgatcgtctagacgatatagtgaaacaaaatatagcggatgaaaaatttgtagattttgttatacacggtctagagcatcaatgtcctgctatacttcgaccattaattaggttgtttattgatatactattatttgttatagtaatttatatttttacggtacgtctagtaagtagaaattatcaaatgttgttggtgttggtggcgctagtcatcacattaactattttttattactttatactataatagtactagactgacttctaacaaacatctcacctgccataaataaatgcttgatattaaagtcttctatttctaacactattccatctgtggaaaataatactctgacattatcgctaattgacacatcggtgagtgatatgcctataaagtaataatcttctttgggcacatataccagtgtaccaggttctaacaacctatttactggtgctcctgtagcatactttttctttaccttgagaatatccatcgtttgcttggtcaatagcgatatgtgattttttatcaaccactcgaaaaagtaattggagtgttcatatcctctacgggctattgtctcatggccgtgtatgaaatttaagtaacacgactgtggtagatttgttctatagagccggttgccgcaaatagatagaactaccaatatgtctgtacaaatgttaaacattaattgattaacagaaaaaacaatgttcgttctgggaatagaaaccagatcaaaacaaaattcgttagaatatatgccacgtttatacatggaatataaaataactacagtttgaaaaataacagtatcatttaaacatttaacttgcggggttaatctcacaactttactgtttttgaactgttcaaaatatagcatcgatccgtgagaaatacgtttagccgcctttaatagaggaaatcccaccgcctttctggatctcaccaacgacgatagttctgaccagcaactcatttcttcatcatccacctgttttaacatataataggcaggagatagatatccgtcattgcaatattccttctcgtaggcacacaatctaatattgataaaatctccattctcttctctgcatttattatcttgtctcggtggctgattaggctgtggtcttggtttaggccttggtctatcgttgttgaatctattttggtcattaaatctttcatttcttcctggtatatttctatcacctcgtttggttggatttttgtctatattatcgtttgtaacatcggtacgggtattcatttatcacaaaaaaaacttctctaaatgagtctactgctagaaaacctcatcgaagaagataccatattttttgcaggaagtatatctgagtatgatgatttacaaatggttattgccggcgcaaaatccaaatttccaagatctatgctttctatttttaatatagtacctagaacgatgtcaaaatatgagttggagttgattcataacgaaaatatcacaggagcaatgtttaccacaatgtataatataagaaacaatttgggtctaggagatgataaactaactattgaagccattgaaaactatttcttggatcctaacaatgaagttatgcctcttattattaataatacggatatgactgccgtcattcctaaaaaaagtggtaggagaaagaataagaacatggttatcttccgtcaaggatcatcacctatcttgtgcattttcgaaactcgtaaaaagattaatatttataaagaaaatatggaatccgcgtcgactgagtatacacctatcggagacaacaaggctttgatatctaaatatgcgggaattaatgtcctgaatgtgtattctccttccacatccataagattgaatgccatttacggattcaccaataaaaataaactagagaaacttagtactaataaggaactagaatcgtatagttctagccctcttcaagaacccattaggttaaatgattttctgggactattggaatgtgttaaaaagaatattcctctaacagatattccgacaaaggattgattactataaatggagaatgttcctaatgtatactttaatcctgtgtttatagagcccacgtttaaacattctttattaagtgtttataaacacagattaatagttttatttgaagtattcgttgtattcattctaatatatgtattttttagatctgaattaaatatgttcttcatgcctaaacgaaaaatacccgatcctattgatagattacgacgtgctaatctagcgtgtgaagacgataaattaatgatctatggattaccatggatgacaactcaaacatctgcgttatcaataaatagtaaaccgatagtgtataaagattgtgcaaagcttttgcgatcaataaatggatcacaaccagtatctcttaacgatgttcttcgcagatgatgattcattttttaagtatttggctagtcaagatgatgaatcttcattatctgatatattgcaaatcactcaatatctagactttctgttattattattgatccaatcaaaaaataaattagaagccgtgggtcattgttatgaatctctttcagaggaatacagacaattgacaaaattcacagactctcaagattttaaaaaactgtttaacaaggtccctattgttacagatggaagggtcaaacttaataaaggatatttgttcgactttgtgattagtttgatgcgattcaaaaaagaatcctctctagctaccaccgcaatagatcctattagatacatagatcctcgtcgcgatatcgcattttctaacgtgatggatatattaaagtcgaataaagtgaacaataattaattctttattgtcatcatgaacggcggacatattcagttgataatcggccccatgttttcaggtaaaagtacagaattaattagacgagttagacgttatcaaatagctcaatataaatgcgtgactataaaatattctaacgataatagatacggaacgggactatggacgcatgataagaataattttgaagcattggaagcaactaaactatgtgatgtcttggaatcaattacagatttctccgtgataggtatcgatgaaggacagttctttccagacattgttgaattctgtgagcgtatggcaaacgaaggaaaaatagttatagtagccgcactcgatgggacatttcaacgtaaaccgtttaataatattttgaatcttattccattatctgaaatggtggtaaaactaactgctgtgtgtatgaaatgctttaaggaggcttccttttctaaacgattgggtgaggaaaccgagatagagataataggaggtaatgatatgtatcaatcggtgtgtagaaagtgttacgtcggctcataatattatattttttatctaaaaaactaaaaataaacattgattaaattttaatataatacttaaaaatggatgttgtgtcgttagataaaccgtttatgtattttgaggaaattgataatgagttagattacgaaccagaaagtgcaaatgaggtcgcaaaaaaactgccgtatcaaggacagttaaaactattactaggagaattattttttcttagtaagttacagcgacacggtatattagatggtgccaccgtagtgtatataggatcggctcctggtacacatatacgttatttgagagatcatttctataatttaggagtgatcatcaaatggatgctaattgacggccgccatcatgatcctattttaaatggattgcgtgatgtgactctagtgactcggttcgttgatgaggaatatctacgatccatcaaaaaacaactgcatccttctaagattattttaatttctgatgtgagatccaaacgaggaggaaatgaacctagtacggcggatttactaagtaattacgctctacaaaatgtcatgattagtattttaaaccccgtggcatctagtcttaaatggagatgcccgtttccagatcaatggatcaaggacttttatatcccacacggtaataaaatgttacaaccttttgctccttcatattcagctgaaatgagattattaagtatttataccggtgagaacatgagactgactcgagttaccaaattagacgctgtaaattatgaaaaaaagatgtactaccttaataagatcgtccgtaacaaagtagttgttaactttgattatcctaatcaggaatatgactattttcacatgtactttatgctgaggaccgtgtactgcaataaaacatttcctactactaaagcaaaggtactatttctacaacaatctatatttcgtttcttaaatattccaacaacatcaactgaaaaagttagtcatgaaccaatacaacgtaaaatatctagcaaaaattctatgtctaaaaacagaaatagcaagagatccgtacgcggtaataaatagaaacgtactactgagatatactaccgatatagagtataatgatttagttactttaataaccgttagacataaaattgattctatgaaaactgtgtttcaggtatttaacgaatcatccataaattatactccggttgatgatgattatggagaaccaatcattataacatcgtatcttcaaaaaggtcataacaagtttcctgtaaattttctatacatagatgtggtaatatctgacttatttcctagctttgttagactagatactacagaaactaatatagttaatagtgtactacaaacaggcgatggtaaaaagactcttcgtcttcccaaaatgttagagacggaaatagttgtcaagattctctatcgccctaatataccattaaaaattgttagatttttccgcaataacatggtaactggagtagagatagccgatagatctgttatttcagtcgctgattaatcaattagtagagatgagataagaacattataataatcaataatatatcttatatcttatatcttatatcttatatcttgtttagaaaaatgctaatattaaaatagctaacgctagtaatccaatcggaagccatttgatatctataatagggtatctaatttcctgatttaaatagcggacagctatattctcggtagctactcgtttggaatcacaaacattatttacatctaatttactatctgtaatggaaacgtttcccaatgaaatggtacaatccgatacattgcattttgttatatttttttttaaagaggctggtaacaacgcatcgcttcgtttacatggctcgtaccaacaataatagggtaatcttgtatctattcctatccgtactatgcttttatcaggataaatacatttacatcgtatatcgtctttgttagcatcacagaatgcataaatttgttcgtccgtcatgataaaaatttaaagtgtaaatataactattatttttatagttgtaataaaaagggaaatttgattgtatactttcggttctttaaaagaaactgacttgataaaaatggctgtaatctctaaggttacgtatagtctatatgatcaaaaagagattaatgctacagatattatcattagtcatgttaaaaatgacgacgatatcggtaccgttaaagatggtagactaggtgctatggatggggcattatgtaagacttgtgggaaaacggaattggaatgtttcggtcactggggtaaagtaagtatttataaaactcatatagttaagcctgaatttatttcagaaattattcgtttactgaatcatatatgtattcactgcggattattgcgttcacgagaaccgtattccgacgatattaacctaaaagagttatcgggacacgctcttaggagattaaaggataaaatattatccaagaaaaagtcatgttggaacagtgaatgtatgcaaccgtatcaaaaaattactttttcaaagaaaaaggtttgtttcgtcaacaagttggatgatattaacgttcctaattctctcatctatcaaaagttaatttctattcatgaaaagttttggccattattagaaattcatcaatatccagctaacttattttatacagactactttcccatccctccgttgattattagaccggctattagtttttggatagatagtatacccaaagagaccaatgaattaacttacttattaggtatgatcgttaagaattgtaacttgaatgctgatgaacaggttatccagaaggcggtaatagaatacgatgatattaaaattatttctaataacactaccagtatcaatttatcatatattacatccggcaaaaataatatgattagaagttatatcgtcgcccgacgaaaagatcagaccgctagatctgtaattggtcccagtacatctatcaccgttaatgaggtaggaatgcccgcatatattagaaatacacttacagaaaagatatttgttaatgcctttacagtggataaagttaaacaactattagcgtcaaaccaagttaaattttactttaataaacgattaaaccaattaacaagaatacgccaaggaaagtttattaaaaataaaatacatttattgcctggtgattgggtagaagtagctgttcaagaatatacaagtattatttttggaagacagccgtctctacatagatacaacgtcatcgcttcatctatcagagctaccgaaggagatactatcaaaatatctcccggaattgccaactctcaaaatgctgatttcgacggggatgaggaatggatgatattagaacaaaatcctaaagctgtaattgaacaaagtattcttatgtatccgacgacgttactcaaacacgatattcatggagcccccgtttatggatctattcaagatgaaatcgtagcagcgtattcattgtttaggatacaagatctttgtttagatgaagtattgaacatcttggggaaatatggaagagagttcgatcctaaaggtaaatgtaaattcagcggtaaagatatctatacttacttgataggtgaaaagattaattatccgggtctcttaaaggatggtgaaattattgcaaacgacgtagatagtaattttgttgtggctatgaggcatctgtcattggctggactcttatccgatcataagtcgaacgtggaaggtatcaactttattatcaagtcatcttatgtttttaagagatatctatctatttacggttttggggtgacattcaaagatctgagaccaaattcgacgttcactaataaattggaggccatcaacgtagaaaaaatagaacttatcaaagaagcatacgccaaatatctcaacgatgtaagagacgggaaaatagttccattatctaaagctttagaggcggactatgtggaatccatgttatccaacttgacaaatcttaatatccgagagatagaagaacatatgagacaaacgctgatagatgatccagataataacctcctgaaaatggccaaagcgggttataaagtaaatcccacagaactaatgtatattctaggtacgtatggacaacaaaggattgatggtgaaccagcagagactcgagtattgggtagagttttaccttactatcttccagactctaaggatccagaaggaagaggttatattcttaattctttaacaaaaggattaacgggttctcaatattacttttcgatgctggttgcaagatctcaatctactgatatcgtctgtgaaacatcacgtaccggaacactggctagaaaaatcattaaaaagatggaggatatggtggtcgacggatacggacaagtagttataggtaatacgctcatcaagtacgccgccaattataccaaaattctaggctcagtatgtaaacctgtagatcttatctatccagatgagtccatgacttggtatttggaaattagtgctctgtggaataaaataaaacagggattcgtttactctcagaaacagaaacttgcaaagaagacattggcgccgtttaatttcctagtattcgtcaaacccaccactgaggataatgctattaaggttaaggatctgtacgatatgattcataacgtcattgatgatgtgagagagaaatacttctttacggtatctaatatagattttatggagtatatattcttgacgcatcttaatccttctagaattagaattacaaaagaaacggctatcactatctttgaaaagttctatgaaaaactcaattatactctaggtggtggaactcctattggaattatttctgcacaggtattgtctgagaagtttacacaacaagccctgtccagttttcacactactgaaaaaagtggtgccgtcaaacaaaaacttggtttcaacgagtttaataacttgactaatttgagtaagaataagaccgaaattatcactctggtatccgatgatatctctaaacttcaatctgttaagattaatttcgaatttgtatgtttgggagaattaaatccagacatcactcttcgaaaagaaacagataggtatgtagtagatataatagtcaatagattatacatcaagagagcagaaataaccgaattagtcgtcgaatatatgattgaacgatttatctcctttagcgtcattgtaaaggaatggggtatggaaacattcattgaggatgaggataatattagatttactgtctacctaaatttcgttgaaccggaagaattgaatcttagtaagtttatgatggttcttccgggtgccgccaacaagggaaagattagtaaattcaagattcctatctctgactatacgggatatgacgacttcaatcaaacaaaaaagctcaataagatgactgtagaactcatgaatctaaaagaattgggttctttcgatttggaaaacgtcaacgtgtatcctggagtatggaatacatacgatatcttcggtatcgaggccgctcgtgaatacttgtgcgaagccatgttaaacacctatggagaagggttcgattatctgtatcagccttgtgatcttctcgctagtttactatgtgctagttacgaaccagaatcagtgaataaattcaagttcggcgcagctagtactcttaagagagctacgttcggagacaataaagcattgttaaacgcggctcttcataaaaagtcagaacctattaacgataatagtagctgccacttttttagcaaggtccctaatataggaactggatattacaaatactttatcgacttgggtcttctcatgagaatggaaaggaaactatctgataagatatcttctcaaaagatcaaggaaatggaagaaacagaagacttttaattcttatcaataacatatttttctatgatctgtcttttaaacgatggattttccacaaatgcgcctctcaagtccctcatagaatgatacacgtataaaaaatatagcataggcgatgactccttatttttagacattagatatgccaaaatcatagccccgcttctatttactcccgcagcacaatgaaccaacacgggctcgtttcgttgatcacatttagataaaaaggcggttacgtcgtcaaaatatttactaatatcggtagttgtatcatctaccaacggtatatgaataatattaatattagagttaggtaatgtatatttatccatcgtcaaatttaaaacatatttgaacttaacttcagatgatggtgcatccatagcatttttataatttcccaaatacacattattggttacccttgtcattatagtgggagatttggctctgtgcatatctccagttgaacgtagtagtaagtatttatacaaacttttcttatccatttataacgtacaaatggataaaactactttatcggtaaacgcgtgtaatttagaatacgttagagaaaaggctatagtaggcgtacaagcagccaaaacatcaacacttatattctttgttattatattggcaattagtgcgctattactctggtttcagacgtctgataatccagtctttaatgaattaacgagatatatgcgaattaaaaatacggttaacgattggaaatcattaacggatagcaaaacaaaattagaaagtgatagaggtagacttctagccgctggtaaggatgatatattcgacttcaaatgtgtggatttcggcgcctattttatagctatgcgattggataagaaaacatatctgccgcaagctattaggcgaggtactggagacgcgtggatggttaaaaaggcggcaaaggtcgatccatctgctcaacaattttgtcagtatttgataaaacacaagtctaataatgttattacttgtggtaatgagatgttaaatgaattaggttatagcggttattttatgtcaccgcattggtgttccgattttagtaatatggaatagtgttagataaatgcggtaacgaatgttcctgtaaggaaccataacagcttagatttaacgttaaagatgagcataaacataataaacaaaattacaatcaaacttataacattaatatcaaacaatccaaaaaatgaaatcagtggagtagtaaacgcgtacataactcctggataacgtttagcagctgccgttcctattctagaccaaaaattcggtttcatgttttcgaaacggtattctgcaacaagtcgaggatcgtgttctacatatttggcggcgttatccagtatctgcctattgatcttcatttcgttttcgattctggctatttcaaaataaaatcccgatgatagacctccagactttataatttcatctacgatgttcagcgccgtagtaactttaataatataggctgataagctaacatcataccctcctgtatatgtgaatatggcatgatttttgtccattacaagctcggttttaactttattgcctgtaataatttctctcatctgtaggatatctatttttttgtcatgcattgccttcaagacgggacgaagaaacgtaatatcctcaataacgttatcgttttctacaataactacatattctacctttttattttctaactcagtaaaaaaattagaatcccatagggctaaatgtctagcgatatttcttttcgtttcctctgtacacatagtgttacaaaaccctgaaaagaagtgagtatacttgtcatcatttctaatgtttcctccagtccactgtataaacgcataatccttgtaatgatctggatcatccttgactaccacaacatttcttttttctggcataacttcgttgtcctttacatcatcgaacttctgatcattaatatgctcatgaacattaggaaatgtttctgatggaggtctatcaataactggcacaacaataacaggagttttcaccgccgccatttagttattgaaattaatcatatacaactctttaatacgagttatattttcgtctatccattgtttcacattgacatatttcgacaaaaagatataaaatgcgtattccaatgcttctctgtttaatgaattactaaaatatacaaacacgtcactgtctggcaataaatgatatcttagaatattgtaacaatttattttgtattgcacatgttcgtgatctatgagttcttcttcgaatggcataggatctccgaatctgaaaacgtataaataggagttagaataataatatttgagagtattggtaatatataaactctttagcggtataattagtttttttctctcaatttctatttttagatgtgatggaaaaatgactaattttgtagcattagtatcatgaactctaatcaaaatcttaatatcttcgtcacacgttagctctttgaagtttttaagagatgcatcagttggttctacagatggagtaggtgcaacaattttttgttctacacatgtatgtactggagccattgttttaactataatggtgcttgtatcgaaaaactttaatgcagatagcggaagctcttcgccgcgactttctacgtcgtaattgggttctaacgccgatctctgaatggatactagttttctaagttctaatgtgattctctgaaaatgtaaatccaattcctccggcattatagatgtgtatacatcggtaaataaaactatagtatccaacgatcccttctcgcaaattctagtcttaaccaaaaaatcgtatataaccacggagatggcgtatttaagagtggattcttctaccgttttgttcttggatgtcatataggaaactataaagtccgcactactgttaagaatgattactaacgcaactatatagtttaaattaagcattttggaaacataaaataactctgtagacgatacttgactttcgaataagtttgcagacaaacgaagaaagaacagacctctcttaatttcagaagaaaactttttttcgtattcctgacgtctagagtttatatcaataagaaagttaagaattagtcggttaatgttgtatttcattacccaagtttgagatttcataatattatcaaaagacatgataatattaaagataaagcgctgactatgaacgaaatagctatatggttcgctcaagaatatagtcttgttaaacgtggaaacgataactgtatttttaatcacgtcagcggcatctaaattaaatataggtatatttattccacacactctacaatatgccacaccatcttcataataaataaattcgttagcaaaattattaattttagtgaaatagttagcgtcaactttcatagcttccttcaatctaatttgatgctcacacggtgcgaattccactctaacatcccttttccatgcctcaggttcatcgatctctataatatctagttttttgcgtttcacaaacacaggctcgtctctcgcgatgagatctgtatagtaactatgtaaatgataactagatagaaagatgtagctatatagatgacgatcctttaagagaggtataataactttaccccaatcagatagactgttgttatggtcttcggaaaaagaatttttataaatttttccagtattttccaaatatacgtacttaacatctaaaaaatccttaatgataataggaatggataatccgtctattttataaagaaatacatatcgcacattatacttttttttggaaatgggaataccgatgtgtctacataaatatgcaaagtctaaatattttttagagaatcttagttggtccaaattcttttccaagtacggtaatagatttttcatattgaacggtatcttcttaatctctggttctagttccgcattaaatgatgaaactaagtcactatttttataactaacgattacatcacctctaacatcatcatttaccagaatactgatcttcttttgtcgtaaatacatgtctaatgtgttaaaaaaaagatcatacaagttatacgtcatttcatctgtggtattcttgtcattgaaggataaactcgtactaatctcttctttaacagcctgttcaaatttatatcctatatacgaaaaaatagcaaccagtgtttgatcatccgcgtcaatattctgttctatcgtagtgtataacaatcgtatatcttcttctgtgatagtcgatacgttataaaggttgataacgaaaatatttttatttcgtgaaataaagtcatcgtaggattttggacttatattcgcgtctagtagatatgcttttatttttggaatgatctcaattagaatagtctctttagagtccatttaaagttacaaacaactaggaaattggtttatgatgtataatttttttagtttttatagattctttattctatacttaaaaaatgaaaataaatacaaaggttcttgagggttgtgttaaattgaaagcgagaaataatcataaattatttcattatcgcgatatccgttaagtttgtatcgtaatggcgtggtcaattacgaataaagcggatactagtagcttcacaaagatggctgaaatcagagctcatctaaaaaatagcgctgaaaataaagataaaaacgaggatattttcccggaagatgtaataattccatctactaagcccaaaaccaaacgagccactactcctcgtaaaccagcggctactaaaagatcaaccaaaaaggaggaagtggaagaagaagtagttatagaggaatatcatcaaacaactgaaaaaaattctccatctcctggagtcagcgacattgtagaaagcgtggctgctgtagagctcgatgatagcgacggggatgatgaacctatggtacaagttgaagctggtaaagtaaatcatagtgctagaagcgatctctctgacctaaaggtggctaccgacaatatcgttaaagatcttaagaaaattattactagaatctctgcagtatcgacggttctagaggatgttcaagcagctggtatctctagacaatttacttctatgactaaagctattacaacactatctgatctagtcaccgagggaaaatctaaagttgttcgtaaaaaagttaaaacttgtaagaagtaaatgcgtgcacttttttataaagatggtaaactctttaccgataataattttttaaatcctgtatcagacgataatccagcgtatgaggttttgcaacatgttaaaattcctactcatttaacagatgtagtagtatatgaacaaacgtgggaggaggcgttaactagattaatttttgtgggaagcgattcaaaaggacgtagacaatacttttacggaaaaatgcatgtacagaatcgcaacgctaaaagagatcgtatttttgttagagtatataacgttatgaaacgaattaattgttttataaacaaaaatataaagaaatcgtccacagattccaattatcagttggcggtttttatgttaatggaaactatgttttttattagatttggtaaaatgaaatatcttaaggagaatgaaacagtagggttattaacactaaaaaataaacacatagaaataagtcccgatgaaatagttatcaagtttgtaggaaaggacaaagtttcacatgaatttgttgttcataagtctaatagactatataaaccgctattgaaactgacggatgattctagtcccgaagaatttctgttcaacaaactaagtgaacgaaaggtatacgaatgtatcaaacagtttggtattagaatcaaggatctccgaacgtatggagtcaattatacgtttttatataatttttggacaaatgtaaagtccatatctcctcttccgtcaccaaaaaagttaatagcgttaactatcaaacaaactgctgaagtggtaggtcatactccatcaatttcaaaaagagcttatatggcaacgactattttagaaatggtaaaggataaaaattttttagatgtagtatctaaaactacgttcgatgaattcctatctatagtcgtagatcacgttaaatcatctacggatggatgatatagatctttacacaaataattacaagaccgataaatggaaatggataagcgtatgaaatctctcgcaatgacagctttcttcggagagctaagcacattagatattatggcattgataatgtctatatttaaacgccatccaaacaataccattttttcagtggataaggatggtcagtttatgattgatttcgaatacgataattataaggcttctcaatatttggatctgaccctcactccgatatctggagatgaatgcaagactcacgcatcgagtatagccgaacaattggcgtgtgtggatattattaaagaggatattagcgaatatatcaaaactactccccgtcttaaacgatttataaaaaaataccgcaatagatcagatactcgcatcagtcgagatacagaaaagcttaaaatagctctagctaaaggcatagattacgaatatataaaagacgcttgttaataagtaaatgaaaaaaaactagtcgtttataataaaacacgatatggatgccaacgtagtatcatcttctactattgcgacgtatatagacgctttagcgaagaatgcttcagaattagaacagaggtctaccgcatacgaaataaataatgaattggaactagtatttattaagccgccattgattactttgacaaatgtagtgaatatctctacgattcaggaatcgtttattcgatttaccgttactaataaggaaggtgttaaaattagaactaagattccattatctaaggtacatggtctagatgtaaaaaatgtacagttagtagatgctatagataacatagtttgggaaaagaaatcattagtgacggaaaatcgtcttcacaaagaatgcttgttgagactatcgacagaggaacgtcatatatttttggattacaagaaatatggatcctctatccgactagaattagtcaatcttattcaagcaaaaacaaaaaactttacgatagactttaagctaaaatattttctaggatccggtgcccaatctaaaagttctttgttgcacgctattaatcatccaaagtcaaggcctaatacatctctggaaatagaattcacacctagagacaatgaaacagttccatatgatgaactaataaaggaattgacgactctctcgcgtcatatatttatggcttctccagagaatgtaattctttctccgcctattaacgcgcctataaaaacctttatgttgcctaaacaagatatagtaggtttggatctggaaaatctatatgccgtaactaagactgacggcattcctataactatcagagttacatcaaacgggttgtattgttattttacacatcttggttatattattagatatcctgttaagagaataatagattccgaagtagtagtctttggtgaggcagttaaggataagaactggaccgtatatctcattaagctaatagagcccgtgaatgctatcagtgatagactagaagaaagtaagtatgttgaatctaaactagtggatatttgtgatcggatagtattcaagtcaaagaaatacgaaggtccgtttactacaactagtgaagtcgtcgatatgttatctacatatttaccaaagcaaccagaaggtgttattctgttctattcaaagggacctaaatctaacattgattttaaaattaaaaaggaaaatactatagaccaaactgcaaatgtagtatttaggtacatgtccagtgaaccaattatctttggagaatcgtctatctttgtagagtataagaaatttagcaacgataaaggctttcctaaagaatatggttctggtaagattgtgttatataacggcgttaattatctaaataatatctattgtttggaatatattaatacacataatgaagtgggtattaagtccgtggttgtacctattaagtttatagcagaattcttagttaatggagaaatacttaaacctagaattgataaaaccatgaaatatattaactcagaagattattatggaaatcaacataatatcatagtcgaacatttaagagatcaaagcatcaaaataggagatatctttaacgaggataaactatcggatgtgggacatcaatacgccaataatgataaatttagattaaatccagaagttagttattttacgaataaacgaactagaggaccgttgggaattttatcaaactacgtcaagactcttcttatttctatgtattgttccaaaacatttttagacgattccaacaaacgaaaggtattggcgattgattttggaaacggtgctgacctggaaaaatacttttatggagagattgcgttattggtagcgacggatccggatgctgatgctatagctagaggaaatgaaagatacaacaaattaaactctggaattaaaaccaagtactacaaatttgactacattcaggaaactattcgatccgatacatttgtctctagtgtcagagaagtattctattttggaaagtttaatatcatcgactggcagtttgctatccattattcttttcatccgagacattatgctaccgtcatgaataacttatccgaactaactgcttctggaggcaaggtattaatcactaccatggacggagacaaattatcaaaattaacagataaaaagacttttataattcataagaatttacctagtagcgaaaactatatgtctgtagaaaaaatagctgatgatagaatagtggtatataatccatcaacaatgtctactccaatgactgaatacattatcaaaaagaacgatatagtcagagtgtttaacgaatacggatttgttcttgtagataacgttgatttcgctacaattatagaacgaagtaaaaagtttattaatggcgcatctacaatggaagatagaccgtctacaaaaaactttttcgaactaaatagaggagccattaaatgtgaaggtttagatgtcgaagacttacttagttactatgttgtttatgtcttttctaagcggtaaataataatatggtatgggttctgatatccccgttctaaatgcattaaataattccaatagagcgatttttgttcctataggaccttccaactgtggatactctgtattgttaatagatatattaatacttttgtcgggtaacagaggttctacgtcttctaaaaataaaagttttataacatctggcctgttcataaataaaaacttggcgattctatatatactcttattatcaaatctagccattgtcttatagatgtgagctactgtaggtgtaccatttgattttctttctaatactatatatttctctcgaagaagttcttgcacatcatctgggaataaaatactactgttgagtaaatcagttattttttttatatcgatattgatggacatttttatagttaaggataataagtatcccaaagtcgataacgacgataacgaagtatttatacttttaggaaatcacaatgactttatcagattaaaattaacaaaattaaaggagcatgtatttttttctgaatatattgtgactccagatacatatggatctttatgcgtcgaattaaatgggtctagttttcagcacggtggtagatatatagaggtggaggaatttatagatgctggaagacaagttagatggtgttctacatccaatcatatatctaaagatatacccgaagatatgcacactgataaatttgtcatttatgatatatacacttttgacgctttcaagaataaacgattggtattcgtacaggtacctccgtcgttaggagatgatagtcatttgactaatccgttattgtctccgtattatcgtaattcagtagccagacaaatggtcaataatatgatttttaatcaagattcatttttaaaatatttattagaacatctgattagaagccactatagagtttctaaacatataacaatagttagatacaaggataccgaagaattaaatctaacgagaatatgttataatagagataagtttaaggcgtttgtattcgcttggtttaacggcgtttcggaaaatgaaaaggtactagatacgtataaaaaggtatctaatttgatataatgaattcagtgactgtatcacacgcgccatatactattacttatcacgatgattgggaaccagtaatgagtcaattggtagagttttataacgaagtagccagttggctgctacgagacgagacgtcgcctattcctgataagttctttatacagttgaaacaaccgcttagaaataaacgagtatgtgtgtgcggtatagatccgtatccgaaagatggaactggtgtaccgttcgaatcaccaaattttacaaaaaaatcaattaaggagatagcttcatctatatctagattaaccggagtaattgattataaaggttataaccttaatataatagacggggttataccctggaattattacttaagttgtaaattaggagaaacaaaaagtcacgcgatctactgggataagatttccaagttactgctgcagcatataactaaacacgttagtgttctttattgtttgggtaaaacagatttctcgaatatacgggcaaagttagaatccccggtaactaccatagtcggatatcatccagcggctagagaccgccaattcgagaaagatagatcatttgaaattatcaacgttttactggaattagacaacaaggcacctataaattgggctcaagggtttatttattaatgctttagtgaaattttaacttgtgttctaaatggatgcggctattagaggtaatgatgttatctttgttcttaagactataggtgtcccgtcagcgtgcagacaaaatgaagatccaagatttgtagaagcatttaaatgcgacgagttagaaagatatattgagaataatccagaatgtacactattcgaaagtcttagggatgaggaagcatactctatagtcagaattttcatggatgtagatttagacgcgtgtctagacgaaatagattatttaacggctattcaagattttattatcgaggtgtcaaactgtgtagctagattcgcgtttacagaatgcggtgccattcatgaaaatgtaataaaatccatgagatctaatttttcattgactaagtctacaaatagagataaaacaagttttcatattatctttttagacacgtataccactatggatacattgatagctatgaaacgaacactattagaattaagtagatcatctgaaaatccactaacaagatcgatagacactgccgtatataggagaaaaacaactcttcgggttgtaggtactaggaaaaatccaaattgcgacactattcatgtaatgcaaccaccgcatgataatatagaagattacctattcacttacgtggatatgaacaacaatagttattacttttctctacaacaacgattggaggatttagttcctgataagttatgggaaccagggtttatttcattcgaagacgctataaaaagagtttcaaaaatattcattaattctataataaactttaatgatctcgatgaaaataattttacaacggtaccactggtcatagattacgtaacaccttgtgcattatgtaaaaaacgatcgcataaacatccgcatcaactatcgttggaaaatggtgctattagaatttacaaaactggtaatccacatagttgtaaagttaaaattgttccgttggatggtaataaactgtttaatattgcacaaagaattttagacactaactctgttttattaaccgaacgaggagaccatatagtttggattaataattcatggaaatttaacagcgaagaacccttgataacaaaactaattttgtcaataagacatcaactacctaaggaatattcaagcgaattactctgtccaagaaaacgaaagactgtagaagctaacatacgagacatgttagtagattcagtggagaccgatacctatccggataaacttccgtttaaaaatggtgtattggacctggtagacggaatgttttactctggagatgatgctaaaaaatatacgtgtactgtatcaaccggatttaaatttgacgatacaaagttcgtcgaagacagtccagaaatggaagagttaatgaatatcattaacgatatccaaccattaacggatgaaaataagaaaaatagagagctatatgaaaaaacattatctagttgtttatgtggtgctaccaaaggatgtttaacattcttttttggagaaactgcaactggaaagtcgacaaccaaacgtttgttaaagtctgctatcggtgacctgtttgttgagacgggtcaaacaattttaacagatgtattggataaaggacctaatccatttatcgctaacatgcatttgaaaagatctgtattctgtagcgaactacctgattttgcctgtagtggatcaaagaaaattagatctgacaatattaaaaagttgacagaaccttgtgtcattggaagaccgtgtttctccaataaaattaataatagaaaccatgcgacaatcattatcgatactaattacaaacctgtttttgataggatagataacgcattaatgagaagaattgccgtcgtgcgattcagaacacacttttctcaaccttctggtagagaggctgctgaaaataatgacgcgtacgataaagtcaaactattagacgaggggttagatggtaaaatacaaaataatagatatagattcgcatttctatacttgttggtgaaatggtacagaaaatatcatgttcctattatgaaactatatcctacaccggaagagattcctgactttgcattctatctcaaaataggtactctgttagtatctagctctgtaaagcatattccattaatgacggacctctccaaaaagggatatatattgtacgataatgtggttactcttccgttgactactttccaacagaaaatatccaagtattttaattctagactatttggacacgatatagagagcttcatcaatagacataagaaatttgccaatgttagtgatgaatatctgcaatatatattcatagaggatatttcatctccgtaaatatatgctcatatatttatagaagatatcacatatctaaatgaataccggaatcatagatttatttgataatcatgttgatagtataccaactatattacctcatcagttagctactctagattatctagttagaactatcatagatgagaacagaagcgtgttattgttccatattatgggatcaggtaaaacaataatcgctttgttgttcgccttggtagcttccagatttaaaaaggtttacattctagtgccgaacatcaacatcttaaaaattttcaattataatatgggtgtagctatgaacttgtttaatgacgaattcatagctgagaatatctttattcattccacaacaagtttttattctcttaattataacgataacgtcattaattataacggattatctcgctacaataactctatttttatcgttgatgaggcacataatatctttgggaataatactggagaacttatgaccgtgataaaaaataaaaacaagattccttttttactattgtctggatctcccattactaacacacctaatactctgggtcatattatagatttaatgtccgaagagacgatagattttggtgaaattattagtcgtggtaagaaagtaattcagacacttcttaacgaacgcggtgtgaatgtacttaaggatttgcttaaaggaagaatatcatattacgaaatgcctgataaagatctaccaacgataagatatcacggacgtaagtttctagatactagagtagtatattgtcacatgtctaaacttcaagagagagattatatgattactagacgacagctatgttatcatgaaatgtttgataaaaatatgtataacgtgtcaatggcagtattgggacaacttaatctgatgaataatttagatactttatttcaggaacaggataaggaattgtacccaaatctgaaaataaataatggcgtgttatacggagaagaattggtaacgttaaacattagttccaaatttaaatactttattaatcggatacagacactcaacggaaaacattttatatacttttctaattctacatatggcggattggtaattaaatatatcatgctcagtaatggatattctgaatataatggttctcagggaactaatccacatatgataaacggcaaaccaaaaacatttgctatcgttactagtaaaatgaaatcgtctttagaggatctattagatgtgtataattctcctgaaaacgatgatggtagtcaattgatgtttttgttttcatcaaacattatgtccgaatcctatactctaaaagaggtaaggcatatttggtttatgactatcccagatactttttctcaatacaaccaaattcttggacgatctattagaaaattctcttacgccgatatttctgaaccagttaatgtatatcttttagccgccgtatattccgatttcaatgacgaagtgacgtcattaaacgattacacacaggatgaattaattaatgttttaccatttgacatcaaaaagctgttgtatctaaaatttaagacgaaagaaacgaatagaatatactctattcttcaagagatgtctgaaacgtattctcttccaccacatccatcaattgtaaaagttttattgggagaattggtcagacaatttttttataataattctcgtattaagtataacgataccaagttacttaaaatggttacatcagttataaaaaataaagaagacgctaggaattacatagatgatattgtaaacggtcacttctttgtatcgaataaagtatttgataaatctcttttatacaaatacgaaaacgatattattacagtaccgtttagactttcctacgaaccatttgtttggggagttaactttcgtaaagaatataacgtggtatcttctccataaaactgatgagatatataaagaaataaatgtcgagctttgttaccaatggatacctttccgttacattggaaccacacgagctgacgttagacataaaaactaatattaggaatgccgtatataagacgtatctccatagagaaattagtggtaaaatggccaagaaaatagaaattcgtgaagacgtggaattacctctcggcgaaatagttaataattctgtagttataaacgttccgtgtgtaataacctacgcgtattatcacgttggggatatagtcagaggaacattaaacatcgaagatgaatcaaatgtaactattcaatgtggagatttaatctgtaaactaagtagagattcgggtactgtatcatttagcgattcaaagtactgcttttttcgaaatggtaatgcgtatgacaatggcagcgaagtcactgccgttctaatggaggctcaacaaggtatcgaatctagttttgtttttcttgcgaatatcgtcgattcataaaaaagagaatagcggtaagtataaacacgaatactatggcaataattgcgaatgttttattctcttcgatatatttttgataatatgaaaaacatgtctctctcaaatcggacaaccatctcataaaatagttctcgcgcgctggagaggtagttgccgctcgtataatctctccagaataatatacttgcgtgtcgtcgttcaatttatacggatttctatagttctctgttatataatgcggttttccatcatgattagacgacgacaatagtgttctaaatttagatagttgatcagaatgaatgtttattggcgttggaaaaattatccatacagcgtctgcagagtggttgatagttgttcctagatatgtaaaataatccaacttactaggcagcaaattgtctagataaaatactgaatcaaacggtgcagacgtattggcggatctaatggaatccaattgattaactatcttttgaaaatatacatttttatgatccaatacttgtaagaatatagaaataatgataagtccatcatcgtgtttttttgcctcttcataagaactatattttttcttattccaatgaacaagattaatctctccagagtatttgtacacatctatcaagtgattggatccataatcgtcttcctttccccaatatatatgtagtgatgataacacatattcattggggagaaaccctccacttatatatcctcctttaaaattaatccttactagttttccagtgttctggatagtggttggtttcgactcattataatgtatgtctaacggcttcaatcgcgcgttagaaattgcttttttagtttctatattaataggagatagttgttgcggcatagtaaaaatgaaatgataactgtttaaaaatagctcttagtatgggaattacaatggatgaggaagtgatatttgaaactcctagagaattaatatctattaaacgaataaaagatattccaagatcaaaagacacgcatgtgtttgctgcgtgtataacaagtgacggatatccgttaataggagctagaagaacttcattcgcgttccaggcgatattatctcaacaaaattcagattctatctttagagtatccactaaactattacggtttatgtactacaatgaactaagagaaatctttagacggttgagaaaaggttctatcaacaatatcgatcctcactttgaagagttaatattattgggtggtaaactagataaaaaggaatctattaaagattgtttaagaagagaattaaaagaggaaagtgatgaacgtataacagtaaaagaatttggaaatgtaattctaaaacttacaacacgggataaattatttaataaagtatatataagttattgcatggcgtgttttattaatcaatcgttggaggatttatcgcatactagtatttacaatgtagaaattagaaagattaaatcattaaatgattgtattaacgacgataaatacgaatatctgtcttatatttataatatgctagttaatagtaaatgaacttttacagatctagtataattagtcagattattaagtataatagacgactagctaagtctattatttgcgaggatgactctcaaattattacactcacggcattcgttaaccaatgcctatggtgtcataaacgagtatccgtgtccgctattttattaactactgataacaaaatattagtatgtaacagacgagatagttttctctattctgaaataattagaactagaaacatgtttagaaagaaacgattatttctgaattattccaattatttgaacaaacaggaaagaagtatactatcgtcatttttttctctagatccagctactactgataatgatagaatagacgctatttatccgggtggcatacccaaaaggggtgagaatgttccagagtgtttatccagggaaattaaagaagaagttaatatagacaattcttttgtattcatagacactcggttttttattcatggcatcatagaagataccattattaataaattttttgaggtaatcttctttgtcggaagaatatctctaacgagtgatcaaatcattgatacatttaaaagtaatcatgaaatcaaggatctaatatttttagatccgaattcaggtaatggactccaatacgaaattgcaaaatatgctctagatactgcaaaacttaaatgttacggccatagaggatgttattatgaatcattaaaaaaattaactgaggatgattgattaaaaaatataaattaatttaccatcgtgtatttttataacgggattgtccggcatatcatgtagatagttaccgtctacatcgtatactcgaccatctacgcctttaaatcctctatttattgacattaatctattagaattggaataccaaatattagtaccctcaattagtttattggtaatattttttttagacgatagatcgatggctcttgaaaccaaggttttccaaccggactcattgtcgatcggtgagaagtctttttcattagcatgaatccattctaatgatgtatgtttaaacactctaaacaattggacaaattcttttgatttgctttgaatgatttcaaataggtcttcgtctacagtaggcataccattagataatctagccattataaagtgcacgtttacatatctacgttctggaggagtaagaacgtgactattgagacgaatggctcttcctactatctgacgaagagacgcctcgttccatgtcatatctaaaatgaagatatcattaattgagaaaaaactaataccctcgcctccactagaagagaatacgcatgttttaatgcattctccgttagtgtttgattcttggttaaactcagccaccgccttgattctagtatcttttgttctagatgagaactctatattagagataccaaagactttgaaatatagtaataagatttctattcctgactgattaacaaatggttcaaagactagacatttaccatgggatgctaatattcccaaacatacatctataaatttgacgcttttctcttttaattcagtaaatagagagatatcagccgcactagcatcccctttcaatagttctccctttttaaaggtatctaatgcggatttagaaaactctctatctcttaatgaatttttaaaatcattatatagtgttgctatctcttgcgcgtattcgcccggatcacgattttgtctttcaggaaagctatcgaacgtaaacgtagtagccatacgtctcagaattctaaatgatgatatacctgtttttatttcagcgagtttagccttttgataaatttcttcttgctttttcgacatattaacgtatcgcattaatactgttttcttagcgaatgatgcagacccttctacgtcatcaaaaatagaaaactcgttattaactatatacgaacatagtcctcctagtttggagactaattctttttcatcgactagacgtttattctcaaatagtgattggtgttgtaaggatcctggtcgtagtaagttaaccaacatggtgaattcttgcacactattgacgataggtgtagccgataaacaaatcatcttatggttttttaacgcaatggtcttagataaaaaattatatactgaacgagtaggacggatcttaccatcttctttgattaatgatttagaaatgaagttatgacattcatcaatgatgacgcatattctactcttggaattaatagttttgatattagtaaaaaatttatttctaaaattttgatcatcgtaattaataaaaatacaatccttcgttatctctggagcgtatctgagtatagtgttcatccaaggatcttctatcaaagcctttttcaccaataagataatagcccaattcgtataaatatccttaagatgtttgagaatatatacagtagtcattgttttaccgacacccgtttcatggaacaataaaagagaatgcatactgtctaatcctaagaaaactcttgctacaaaatgttgataatccttgaggcgtactacgtccgaccccatcatttcaacgggcatattagtagttctgcgtaaggcataatcgatataggccgcgtgtgatttactcatttatgagtgataagtaataactatgttttaaaaatcacagcagtagtttaactagtcttctctgatgtttgttttcgatactttttgaatcagaagtcatactagaataaagcaacgagtgaacgtaatagagagcttcgtatactctattcgaaaactctaagaacttattaatgaattccgtatccactggattgtttaaaatactaaattgaacactgttcacatccttccaagaagaagacttagtgacggacttaacatgagacataaataaatccaaattttttttacaaacatcactagccaccataatggcgctatctttcaaccagctatcgcttacgcattttagcagtctaacatttttaaagagactacaatatattctcatagtatcgattacacctctaccgaataaagttggaagtttaataatacaatatttttcgtttacaaaatcaaataatggtcgaaacacgtcgaaggttaacatcttataatcgctaatgtatagattgttttcagtgagatgattattagatttaatagcatctcgttcacgtttgaacagtttattgcgtgcgctgaggtcggcaactacggcgtccgctttagtactcctcccataatactttacgctattaatctttaaaatttcatagactttatctagatcgctttctggtaacatgatatcatgtgtaaaaagttttaacatgtcggtcggcattctatttagatcattaactctagaaatctgaagaaagtaattagctccgtattccagactaggtaatgggcttttacctagagacagattaagttctggcaatgtttcataaaatggaagaaggacatgcgttccctcccggatattttttacaatttcatccatttacaactctatagtttgttttcattattattagttattatctcccataatcttggtaatacttaccccttgatcgtaagataccttatacaggtcattacatacaactaccaattgtttttgtacataatagattggatggttgacatccatggtggaataaactactcgaacagatagtttatctttccccctagatacattagccgtaatagttgtcggcctaaagaatatctttggtgtaaagttaaaagttagggttcttgttccattattgctttttgtcagtagttcattataaattctcgagatgggtccgttctctgaatatagaacatcatttccaaatctaacttctagtctagaaataatatcggtcttattcttaaaatctattcccttgatgaagggatcgttaatgaacaaatccttggcctttgattcggctgatctattatctccgttatagacgttacgttgactagtccaaagacttacaggaatagatgtatcgatgatgttgatactatgtgatatgtgagcaaagattgttctcttagtggcatcactatatgttccagtaatggcggaaaactttttagaaatgttatatataaaagaattttttcgtgttccaaacattagcagattagtatgaagataaacactcatattatcaggaacattatcaatttttacatacacatcagcatcttgaatagaaacgataccatcttctggaacctctacgatctcggcagactccggataaccagtcggtgggccatcgctaacaataactagatcatccaacaatctactcacatatgcatctatataatctttttcatcttgtgagtaccctggatacgaaataaatttattatccgtatttccataataaggtttagtataaacagagagagatgttgccgcatgaacttcagttacagtcgccgttggttggtttatttgacctattactctcctaggtttctctataaacgatggtttaatttgtacattcttaaccatatatccaataaagctcaattcaggaacataaacaaattctttgttgaacgtttcaaagtcgaacgaagagtcacgaataacgatatcggatactggattgaaggttaccgttacggtaatttttgaatcggatagtttaagactgctgaatgtatcttccacatcaaacggagttttaatataaacgtatactgtagatggttctttaatagtgtcattaggagttaggccaatagaaatatcattaagttcactagaatatccagagtgtttcaaagcaattgtattattgatacaattattatataattcttcgccctcaatttcccaaataacaccgttacacgaagagatagatacgtgattaatacatttatatccaacatatggtacgtaactgaatcttcccatacctttaacttctggaagttccaaactcagaaccaaatgattaagcgcagtaatatactgatccctaatttcgaagctagcgatagcctgattgtctggaccatcgtttgtcataactccggatagagaaatatattgcggcatatacaaagttggaatttgactatcgactgcgaagacattagaccgtttaatagagtcatccccaccgatcaaagaattaatgatagtattattcattttctatttaaaatggaaaaagcttacaataaactccgtagagaaatatctataatttgtgagttttccttaaagtaacagcttccgtaaacgccgtctttatctcttagtaggtttattgtatttatgaccttttccttatcttcatagaatactaaaggcaacaaagaaatttttggttcttctctaagagctacgtgagacttaaccatagacgccaacgaatccctacatattttagaacagaaatacccaacttcaccacccttgaatgtctcaatactaataggtttaaaaaccaaatcttgattacaaaaccaacacttatcaattacactatttgtcttaatagacacatctgccatagatttataatactttggtagtatacaagcgagtgcttcttctttagcgggcttaaagactgctttaggtgctgaaataaccacatctggaaggcttactcgcttagccatttaattacggaactatttttttatacttctaatgagcaagtagaaaacctctcatctacaaaaacgtactcgtgtccataatcctctaccatagttacacgttttttagatctcatatgtgctaaaaagttttcccatactaattggttactattatttttcgtataatttttaacagtttgaggttttagatttttagttacagaagtgatatcgaatattttatccaaaaagaatgaataattaattgtcttagaaggagtgttttcttggcaaaagaataccaagtgcttaaatatttctactacttcattaatcttttctgtactcagattcagtttctcatcttttacttgattgattatttcaaagactaacttataatcctttttatttattctctcgttagccttaagaaaactagatacaaaatttgcatctacatcatccgtggatatttgatttttttccatgatatccaagagttccgagataatttctccagaacattgatgagacaataatctccgcaatacatttctcaaatgaataagtttattagacacatggaagtttgactttttttgtacctttgtacatttttgaaataccgactcgcaaaaaatacaatattcatatccttgttcagatactataccgttatgtctacaaccgctacataatcgtagattcatgttaacactctacgtatctcgtcgtccaatattttatataaaaacattttatttctagacgttgccagaaaatcctgtaatatttttagttttttgggctgtgaataaagtatcgccctaatattgttaccgtcttccgccaatatagtagttaaattatccgcacatgcagaagaacaccgcttaggcggattcagtacaatgttatatttttcgtaccaactcatttaaatatcataatctaaaatagttctgtaatatgtctagcgctaatatattgatcataatcctgtgcataaattaagatacaacaatgtctcgaaatcatcgacatggcttcttccatagttagaagatcgtcgtcaaagttagcaacgtgattcatcaacatttgctgttttgaggcagcaaatactgaaccgtcgccattcaaccattcataaaaaccatcgtctgaatccattgataatttcttgtactggtttttgagagctcgcatcaatctagcatttctagctcccggattgaaaacagaaagaggatcgtacatccagggtccattttctgtaaatagaatcgtataatgtcccttcaagaagatatcagacgatccacaatcaaagaattggtctccgagtttgtaacaaactgcggactttaacctatacatgataccgtttagcataatttctggtgatacgtcaatcggagtatcatctattagagatctaaagccggtgtaacattctccaccaaacatattcttattctgacgtcgttctacataaaacatcattgctccattaacgataacaggggaatgaacagcactacccatcacattagttcccaatggatcaatgtgtgtaactccagaacatcttccatagcctatgttaggaggagcgaacaccactcttccactattgccatcgaatgccatagaataaatatccttggaattgatagaaatcggactgtcggatgttgtgatcatcttcataggattaacaactatgtatggtgccgcctgaagtttcatatcgtaactgatgccgtttataggtctagccacagaaaccaacgtaggtctaaatccaactatagacaaaatagaagccaatatctgttcctcatctgtcataacttgagagcatccagtatgaataatcttcattagatggggatctaccgcatcatcatcgttacaataaaaaattcccattctaatgttcataattgcttttctaatcatggtatgcatgtttgctctctgaatctctgtggaaattagatctgatacacctgtaatcactatcggattatcctccgtaagacgattaaccaacaacatataattataagactttacttttctaaattcataaagttgctggattaggctataggtgtctccatgtacatacgcgttctcgagcgcaggaagtttaataccgaatagtgccatcagaataggatgaatatagtaattagtttctggttttctataaataaaagacaaatcttgtgaactagacatatcggtaaaatgcatggattggaatcgtgtagtcgacagaagaatatgatgattagatggagagtatattttatctaactctttgagttggtcaccgattctaggactagctcgagaatgaataagtactaaaggatgagtacatttcacagaaacactagcattgttcaatgtgctctttacatgggtaaggagttgaaatagctcgtttctatttgttctgacaatatttagtttattcataatgttaagcatatcctgaatagtaaagttagatgtgtcatacttgttagtagttagatatttagcaattgcattcccatcatttctcaatctcgtactccaatcatgtgtagatgctacttcatctatagaaaccatacaatcctttttgataggctgttgagattgattatttcctgcacgtttaggtttggtacgttgatttctagcccctgcggatataaagtcatcgtctacaatttgggacaatgaattgcatacactacaagacaaagatttatcagaagtgtgaatatgatcttcatctaccaaagaaagagtttgattagtataactagattttagtcctgcgttagatgttaaaaaaacatcgctattgaccacggcttccattatttatattcgtagtttttactcgaaagcgtgattttaatatccaatcttattacttttggaatcgttcaaaacctttgactaattgtagaatttgatctattgccctacgcgtatactcccttgcatcatatacgttcgtcaccagatcgtttgtttcggcctgaagttggtgcatatctttttcaacactcgacatgagatccttaagggccatatcgtctagattttgttgagatgctgctcctggatttggattttgttgtgctgttgtacatactgtaccaccagtaggtgtaggagtacatacagtggccacaataggaggttgaggaggtgtaaccgttggagtagtacaagaaatacttccatccgattgttgtgtacatgtagttgttggtaacgtctgagaaggttgggtagatggcggtgtcgtcgtcttttgatctttattaaatttagagataatatcctgaacagcattgctcggcgtcaacgctggaaggagtgaactcgccggcgcatcagtatcttcagacagccaatcaaaaagattagacatatcagatgatgtattagtttgttgtcgtggttttggtgtaggagcagtactactaggtagaagaataggagccgatgtagctgttggaaccggctgtggagttatatgaatagttggttgtagcggttggataggctgtctgctggcggccatcatattatctctagctagttgttctcgcaactgtctttgataatacgactcttgagactttagtcctatttcaatcgcttcatcctttttcgtatccggatccttttcttcagaataatagattgacgactttggtgtagaggattctgccagcctctgtgagaacttgttaaagaagtccatttaaggctttaaaattgaattgcgattataagattaaatggcagacacagacgatattatcgactatgaatccgatgatctcaccgaatacgaggatgatgaagaagaggaagaagatggagagtcactagaaactagtgatatagatcccaaatcttcttataagattgtagaatcagcatccactcatatagaagatgcgcattccaatcttaaacatatagggaatcatatatctgctcttaaacgacgctatactagacgtataagtctatttgaaatagcgggtataatagcagaaagctataacttgcttcaacgaggaagattacctctagtttcagaattttctgacgaaacgatgaagcaaaatatgctacatgtaattatacaagagatagaggagggttcttgtcctatagtcatcgaaaagaacggagaattgttgtcggtaaacgattttgacaaagatggtctaaaattccatctagactatattatcaaaatttggaaacttcaaaaacgatattagaatttatacgaatatcgttctctaaatgtcacaatcaagtctcgcatgttcagcaatttattgtcgtactttatatcgtgttcattaacgatatcttgcaaaatagtaatgattctatcttccttcgatagatattcttcagagattattgtcttatattctttcttgttatcagatatgaatttgataagactttgaacattattgatacccgtctgtttaattttttctacagatattttagttttggcagattctatcgtatctgtcaatagacatccaacatcgacattcgacgtcaattgtctataaatcaacgtataaattttagaaataacattagcgaattgttgtgcattgatgtcgttattctgaaacagtatgattttaggtagcattttcttaacaaagagaacgtatttattgttactcagttgaacagatgatatatccagattactaacgcatctgattccgtataccaaactttcagaagaaatggtgtacaattgtttgtattcattcaatgtctctttttcagaaattagtttagagtcgaatactgcaataattttcaagagatagttttcatcagataagattttatttagtgtagatatgataaaactattgttttgttggagaacttgatacgccgcgttctctgtagtcgacgctctcaaatgggaaacaatctccattatttttttggaatcggatactatatcttcggtatcttgacgcagtctagtatacatagagttaagagagattagagtttgtacattaagcaacatgtctctaaatgtggctacaaacttttcctttttcacatcatctagtttattatataccgatttcacaacggcaccagatttaaggaaccagaatgaaaaactctgataactacaatatttcatcatagttacgattttatcatcttctatagttggtgtaatagcgcatacctttttctccaagactggaaccaacgtcataaaaatgtttaaatcaaaatccatatcaacatctgatgcgctaagaccagtctcgcgttcaagattatctttactaatggtgacgaactcatcgtatagaactctaagtttgtccattatttatttacagatttagttgtttaatttatttgtgctcttccagagttgggatagtatttttctaacgtcggtattatattattaggatctacgttcatatgtatcataatattaatcatccacgttttgataaatctatctttagcttctgaaataacgtatttaaacaaaggagaaaaatatttagctacggcatcagacgcaataacattttttgtaaatgtaacgtatttagacgacagatcttcgttaaaaagttttccatctatgtagaatccatcggttgttaacaccattcccgcgtcagattgaataggagtttgaatagtttgttttggaaatagatccttcaataacttatagttgggtgggaaaaaatcgattttatcactagactctttcttttttactatcattacctcatgaactatttcttgaatgagtatatgtattttctttcctatatcggacgcgttcattggaaaatataccatgtcgttaactataagaatatttttatcctcgtttacaaactgaataatatcagatgtagttcgtaaacgaactatatcatcaccagcacaacatctaactatatgatatccactagtttcctttagccgtttattatcttgttccatattagcagtcattccatcatttaagaaggcgtcaaaaataatagggagaaatgacattttggattctgttacaactttaccaaaattaaggatatacggacttactatctttttctcaacgtcgatttgatgaacacacgatgaaaatgtgcttctatgagattgatcatgtagaaaacaacaagggatacaatattttcgcatatcatgaaatatattaagaaatcccaccttattatatttccccaaaggatccatgcacgtaaacattatgccgttatcattaataaagacttctttctcatcggatctgtaaaagttgttactgatttttttcattccaggatctagataattaataatgatgggttttctattcttattctttgtattttggcatatcctagaccagtaaacagtttccactttggtaaaatcagcagacttttgaacgctattaaacatggcattaatggcaataactaaaaatgtaaaatatttttctatgttaggaatatggtttttcactttaatagatatatggtttttggccaaaatgatagatatttttttatccgaggatagtaaaatattattagtcgccgtctctataaaaatgaagctagtctcgatatccaattttattctagaattgataggagtcgccaaatgtaccttatacgttatatctcccttgatgcgttccatttgtgtatctatatcggacacaagatctgtaaatagttttacgttattaatcatcacggtatcgccgtcgctagataacgctaatgtaccatccaagtcccaaatggagagatttaactgttcatcgtttagaataaaatgattaccggtcatattaataaagtgttcatcgtatctagataacaacgacttataattaatgtccaagtcttgaactcgctgaatgatcttttttaacccagttagttttagattggtacgaaatatattgttaaactttgattctacagtaatgtccaaatctagttgtggaaatacttccatcaacattgtttcaaacttgataatattattatctacatcttcgtacgatccaaattccggaatagatgtatcgcacgctcttgccacccagataaccaaaaagtcacacgctccaggatatacattgtataaaaagctatcgttttttagtagtgtttttttctgcgtgtatacgaagggattaaaaatagtattatcaacgtaactatattccaaattattcttatgagaatagataataatatcgtccttaatatctaacaaatttcctaaatatccctttaattgagtcattcgaagcgtcaatagaatatgtctcttaactatttccggctgttgtatatttaaatgacttcgtaaaaaataatatatgggcgacttctcatctatgtaatcatatggagtgagatatagggctcgttctacctcctgccccttacccacctgtaataccaattgcggacttactatatatcgcatatttatatcgtggggtaaagtgaaaatctactaccgatgatgtaagtcttacaatgttcgaaccagtaccagatcttaatttggaggcctccgtagaactaggggaggtaaatatagatcaaacaacacctatgataaaggaaaatagcggttttatatcccgcagtagacgtctattcgcccatagatctaaggatgatgagagaaaactagcactacgattctttttacaaagactttattttttagatcatagagagattcattatttgttcagatgcgttgacgctgtaaaagacgtcactattaccaaaaaaaataacattatcgtggcgccttatatagcacttttaactatcgcatcaaaaggatgcaaacttacagaaacaatgattgaagcattctttccagaactatataatgaacatagtaagaaatttaaattcaactctcaagtatccatcatccaagaaaaactcggataccagtttggaaactatcacgtttatgattttgaaccgtattactctacagtagctctggctattcgagatgaacattcatctggcatttttaatatccgtcaagagagttatctggtaagttcattatctgaaataacatatagattttatctaattaatctaaaatctgatcttgttcaatggagtgctagtacgggcgctgtaattaatcaaatggtaaatactgtattgattacagtgtatgaaaagttacaactggtcatagaaaatgattcacaatttacatgttcattggctgtggaatcaaaacttccaataaaattacttaaagatagaaatgaattatttacaaaattcattaacgagttaaaaaagaccagttcattcaagataagcaaacgcgataaggatacgctattaaaatattttacttaggactggagttagaatttatagacgactcatttcgtttatcattgttactattattactattactatcattattagtgttggcattattagtattcttcttgtcatcttgttcagaaatatacagcaatgctatacctaatactaaatacattatcatgctcgcaatggctctaacaacaacgaaccaaaatgaatttggtcgtagcttttgttcacaaaaatacataaagaaatgtctacataaatctatggcgccattggctacttgaaatagcgccagtcctcctacagattttaatatagctgtataacatgacatttattcatcatcaaaagagacagagtcaccatctgtcatatttagattttttttcatgtgttcaaagtatcctctactcatttcattataatagtttatcatacttagaattttaggacggatcaatgagtaagacttgactagatcgtcagtagtaatttgtgcatcgtctattctgcatccgcttcgtcgaataatgtatagcatcgctttgagattctccatagctatcaagtctttatacaatgacatggaaatatctgtgaatactttatacttctccaacatcgatgccttaacatcatcgcctactttagcattgaaaatacgttctattgtgtagatggatgtagcaagatttttaaacaacaatgccatcttacacgatgattgcctcaagtctccaatcgtttgtttagaacgattagctacagagtccaatgcttggctgactagcatattattatctttagaaattgtattcttcaatgaggcgtttatcatatctgtgatttcgttagtcatattacagtctgactgggttgtaatgttatccaacatatcacctatggatacggtacacgtaccagcatttgtaataatcctatctaagatgttgtatggcattgcgcagaaaatatcttctcctgtaatatctccactctcgataaatctactcagattattcttaaatgccttattctctggagaaaagatatcagtgtccatcatttcattaatagtatacgcagaaaagataccacgagtatcaattctatccaagatacttatcggttccgagtcacagataatggtttcctctccttcgggagatcctgcatagaaatatctaggacaatagtttctatactgtctgtaactctgataatctctaaagtcactaactgataccatgaaattgagaagatcaaacgctgaagtaattaatttttctgcctcgtttttactacaactagttttcatcaatgtagtgacgatgtattgtttagttacttttggtctaatactgatgatagagatattattgcttcccataatggatcttctagtagtcaccttaaagcccattgatgcgaatagcagatagataaagtcttggtatgactcctttctaatatagtacggactacctttgtcacccaactttatacccacataagccataacaacctctttaatagccgtttcatgaggtttatcagccatgagcctgagtagttggaagaatctcatgaatcccgtctcagaaagtcctatatgcatgatagatttatctttcctgggaaactctcgtatagtcatagatgaaatactctttaaagtttctgaaataagattagtaacagtcttacctccgactactctaggtaacaaacaaactctaataggtgttttctctgcggagataatatcagaaaggatagagcaataagtagtattattgtgattataaagaccgaatacataacaggtagaatttataaacatcatgtcctgaaggtttttagacttgtattcctcgtaatccataccgtcccaaaacatggatttggtaactttgatagccgtagatctttgttccttcgccaacaggttaaagaaattaataaagaatttgttgtttctatttatgtccacaaattgcacgtttggaagcgccacggttacattcactgcagcattttgaggatcgcgagtatgaagtacgatgttattgtttactggtatatctggaaagaaatctaccagtctaggaataagagattgatatcgcatagaaatagtaaagtttataatctcatcatcgaagagcattttgttaccattgtaataaatatccactctgtcatatgtataaatgaagtactgttcaaacatgatgagatgtttatatgttggcatagtagtgagatcgacgtttggtaatggcaatgtattaagattaactccataatgtctagcagcatctgcgatgttataagcgtcgtcaaagcggggtcgatcttgtattgttatatattgtctaacacctataagattatcaaaatcttgtctgcttaatacaccgttaacaatttttgccttgaattcttttattggtgcattaataacatccttatagaggatgttaaacaaataagtgttatcaaagttaagatctggatatttcttttctgctagaacatccattgagtcggagccatctggtttaatataaccaccgataaatctagctctgtattctgtatccgtcaatctaatattaagaaggtgttgagtgaaaggtggaagatcgtaaaagctgtgagtattaatgataggattagtttccgaactaatgttaattggggtattaataatatctatatttccagcgttaagtgtaacattaaacagttttaattcacgtgacgtggtatcaattaaataattaatgcccaatttggatatagcagcctgaagctcatcttgtttagttacggatcctaatgagttattaagcaatatatcgaacggatgaacgaaggttgttttaagttggtcacatactttgtaatctagacatagatgcggaagaacggtagaaactatacgaaataaatattcagagtcctctaattgatcaagagtaactattgacttaataggcatcatttatttagtattaaatgacgaccgtaccagtgacggatatacaaaacgatttaattacagagttttcagaagataattatccatctaacaaaaattatgaaataactcttcgtcaaatgtctattctaactcacgttaacaacgtggtagatagagaacataatgccgccgtagtgtcatctccagaggaaatatcctcacaacttaatgaagatctatttccagatgatgattcaccggccactattatcgaacgagtacaacctcatactactattattgacgatactccacctcctacgtttcgtagagagttattgatatcggaacaacgtcaacaacgagaaaaaagatttaatattacagtatcgaaaaatgctgaagcaataatggaatctagatctatgataacttctatgccaacacaaacaccatccttgggagtagtttatgataaagataaaagaattcagatgttagaggatgaagtggttaatcttagaaatcaacgatctaatacaaaatcatctgataatttagataattttaccaaaatactatttggtaagactccgtataaatcaacagaagttaataagcgtatagccatcgttaattatgcaaatttgaacgggtctcccttatcagtcgaggacttggatgtttgttcggaggatgaaatagatagaatctataaaacgattaaacaatatcacgaaagtagaaaacgaaaaattatcgtcactaacgtgattattattgtcataaacattatcgagcaggcattgctaaaactcggatttgaagaaatcaaaggactgagtaccgatatcacttcagaaattatcgatgtggagatcggagatgactgcgatgctgtagcatcaaaactaggaatcggtaacagtccggttcttaatattgtattgtttatactcaagatattcgttaaacgaattaaaattatttaatttaatacattcccatatccagacaacaatcgtctggattaatctgttcctgtcgtctcataccggacgacatattaatctttttattagtgggcatctttttagatggtttctttttcccagcattaactgattcgatacctagaagatcgtgattgatctctccgaccattccacgaacttctaattggccgtctctgacggtaccataaactattttaccagcattagtaacagcttggacaatctgaccatccatcgcattgtacgatgtagtagtaactgttgttctacgtctaggagcaccagaagtatttttggagcccttggaggctgatgtagaagaagacgaggattttgattttggtttacatgtaatacattttgaactctttgattttgtatcacatgcgccggcagtcacatctgtttgagaattaagattattgttgcctcctttgacggctgcatctccaccgatttgcgctagtagatttttaagctgtggtgtaatcttattaactgtttcgatataatcatcgtaactgcttctaacggctaaattttttttatccgccatttagaagctaaaaatatttttatttatgcagaagatttaactagattatacaatgaactaatatgatccttttccagattatttacaaacttggtattttttggttctggaggaggcgaatttaaattcggacttggattcggattttgtaagttcttgatcttattatacatcgagtataggatggcgacagtaactgctacacaaataccgatcaaaagaagaataccaatcatttattgacaataacttcactattgatcaagtatgcaatatatcatcttttcactaaataagtagtaataatgattcaacaatgtcgagatatatggacgataataatttagttcatggaaatatcgctatgattggtgtgaatgactccgctaactctgtggggtgcgcagtgctttccccacatagaataaattagcattccgactgtgataataataccaagtataaacgccataatactcaatactttccatgtacgagtgggactggtagacttactaaagtcaataaaggcgaagatacacgaaagaatcaaaagaatgattccagcgattagcacgccggaaaaataatttccaatcataagcatcatgtccatttaactaataaaaattttaaatcgccgaatgaacaaagtggaatataaaccatataaaaacaatagtttgtactgcaaaaataatatctatttttgttttcgaagatatggtaaaattaaatagtagtacacagcatgttataactaacagcagcaacggctcgtaattacttatcatttactagacgaaaaggtggtgggatattttcttgctcaaataatacgaatatatcacccatccattttatgcgatgtttatatactctaatctttaatagatctatagacgacgggtttaccaacaatatagattttatcgattcatctaatttaaacccttccttaaacgtgaatgatctattatctggcataacgatgaccctacctgatgaatcggacaatgtactgggccatgtagaataaattatcaacgaattatcgtctacgaacatttatatcatttgttttaattttaggacgcgaataaatggatataaaatagaaaataacagatattacaaccagtgttatggccgcgcccaaccaggtaggcagttttattttatcttttactacaggttctcctggatgtacgtcaccaacggcggacgtagttctagtacaattagacgtaagttccgcttgggaattttttaacgctaaagagttaacgttaatcgtgcacccaacgtatttacatctagttcgttgaacatcttgattataatataaccattttctatctctagattcgtcagtgcactcatgtaaccaacataccctaggtcctaaatatttatctccggaattagattttggataattcgcgcaccaacaatttctatttcctttatgatcgttacaaaagacgtataatgccgtatccccaaaagtaaaataatcaggacgaataattctaataaactcagaacaatatctcgcatccatatgtttggagcaaatatcggaataagtagacatagccggtttccgttttgcacgtaaccattctaaacaattggggtttccaggatcgtttctacaaaatccagtcatgaaatcgtcacaatgttctgtcttgtaattattattaaatatttttggacagtgtttggtatttgtcttagaacaacattttgccacgctatcactatcgcccaggagataatccttttttataaaatgacatcgttgcccggatgctatataatcagtagcgtgttttaaatccttaatatattcaggagttacctcgttctgataatagattaatgatccaggacgaaatttgaaagaactacatggttctccatgaattaatacatattgtttagcaaattcaggaactataaaactactacaatgatctatcgacataccatctatcaaacaaaacttgggtttaatttctcccggagatgtttcataatagtacgtataactttcttctgcaaacttaacagctctattatattcaggataattaaaacctaattccatatatttgtctcgtatatctgctattcctggtgctattttgattctattaagagtaacagctgcccccattcttaataatcgtcagtatttaaactgttaaatgttggtatatcaacatctaccttatttcccgcagtataaggtttgttgcaggtatactgttcaggaatggttacatttatacttcttctatagtcctgtctttcgatgttcatcacatatgcaaagaacagaataaacaaaataatgtaagaaataatattaaatatctgtgaattcgtaaatacattgattgccataataattacagcagctacaatacacacaatagacattcccacagtgttgccattacctccacgatacatttgagttactaagcaataggtaataactaagctagtaagaggcaatagaaaagatgagataaatatcatcaatatagagattagaggagggctatatagagccaagacgaacaaaatcaaaccgagtaacgttctaacatcattatttttgaagattcccaaataatcattcattcctccataatcgttttgcatcatacctccatctttaggcataaacgattgctgctgttcctctgtaaataaatctttatcaagcactccagcacccgcagagaagtcgtcaagcatattgtaatatcttaaataactcatttatatattaaaaaatgtcactattaaagatggagtataatctttatgccgaactaaaaaaaatgacttgtggtcaacccctaagtctttttaacgaagacggggatttcgtagaagttgaaccgggatcatcctttaagtttctgatacctaagggattttacgcctctccttccgtaaagacgagtctagtattcgagacattaacaacgaccgataataaaatcactagtatcaatccaacaaatgcgccaaagttatatcctcttcaacgcaaagtcgtatctgaagtagtttctaatatgaggaaaatgatcgaatcaaaacgtcctctatacattactcttcacttggcgtgtggatttggtaagactattaccacgtgttatcttatggctacacacggtagaaaaaccgtcatttgcgtacccaataaaatgttaatacatcaatggaagacacaggtagaggcagtcggattggaacataagatatccatagatggagtaagtagtctattaaaggaactaaagactcaaagtccggatgtattaatagtagtcagtagacatctgacaaacgatgccttttgtaaatatatcaataagcattatgatttgttcatcttggatgaatcacatacgtataatctgatgaacaatacagcagttacaagatttttagcgtattatcctccgatgatgtgttattttttaactgctacacctagaccatctaaccgaatttattgtaacagtattattaatattgccaagttatccaatctaaaaaaaactatctatgcagtagatagtttttttgagccatattccacagataatattagacatatggtaaaacgactagatggaccatctaataaatatcatatatataccgagaagttattatctgtagacgagcctagaaatcaacttattcttgataccctggtagaagaattcaagtcaggaactattaatcgcattttagttattactaaactacgtgaacatatggtattattctacaaacgattattagattttttcggaccagaggttgtatttataggagacgcccaaaatagacgtactccagatatggtcaaatcaatcaaggaactaaatagatttatattcgtatccaccttattttattccggtactggtttagatattcctagtttggattcgttgttcatttgctcggcagtaatcaacaatatgcaaatagagcaattactagggagggtatgtcgagaaacagaactattagataggacggtatatgtatttcctaacacatccatcaaagaaataaagtacatgataggaaatttcatgcaacgaattattagtctgtctgtagataaactaggatttaaacaaaaaagttatcggaaacatcaagaatccgatcccacttctgcatgtacaacatcatccagagaagaacgtgtattaaatagaatatttaactcgcaaaatcgttaagaagtttaagcgacgatccgcatgctgcgcaggccagtgtattacccctcatagtattaatataatccaatgatacttttgtgatgtcggaaatcttaaccaatttagactgacaggcagaacacgtcatgcaatcatcatcgtcatcgataactgtagtcttgggcttctttttgcgactcttcattccggaacgcacattggtgctatccatttaggtagtaaaaaataagtcagaatatgccctataacacgatcgtgcaaaacctggtatatcgtctctatctttatcacaatatagtgtatcgacatttttattattattgacctcgtttatcttggaacatggaatgggaacatttttgttatcaacggccatctttgccttaattccagatgttgtaaaattataactaaacagtctatcatcgacacaaatgaaattcttgtttagacgtttgtagtttacgtatgcggctcgttcgcgtctcattttttcagatattgcaggtactataatattaaaaataagaatgaaataacataggattaaaaataaagttatcatgacttctagcgctgatttaactaacttaaaagaattacttagtctgtacaaaagtttgagattttcagattctgcggctatagaaaagtataattctttggtagaatggggaacatctacttactggaaaataggcgtgcaaaaggtagctaatgtcgagacgtcaatatctgattattatgatgaggtaaaaaataaaccgtttaatattgatccgggctattacattttcttaccggtatattttgggagcgtctttatttattcgaagggtaaaaatatggtagaacttggatctggaaactcttttcaaataccagatgatatgcgaagtgcgtgtaacaaagtattagacagcgataacggaatagactttctgagatttgttttgttaaacaatagatggataatggaagatgctatatcaaaatatcagtctccagttaatatatttaaactagctagtgagtacggattaaacatacccaaatatttagaaattgaaatagaggaagacacattatttgacgacgagttatactctattatagaacgctctttcgatgataaatttccaaaaatatccatatcgtatattaagttgggagaacttagacggcaagttgtagactttttcaaattctcattcatgtatattgagtccatcaaggtagatcgtataggagataatatttttattcctagcgttataacaaaatcaggaaaaaagatattagtaaaagatgtagaccatttaatacgatccaaggttagagaacatacatttgtaaaagtaaaaaagaaaaacacattttccattttatacgactatgatggaaacggaacagaaactagaggagaagtaataaaacgaattatagacactataggacgagactattatgttaacggaaagtatttctctaaggttggtagtgcaggcttaaagcaattgactaataaattagatattaatgagtgcgcaactgtcgatgagttagttgatgagattaataaatccggaactgtaaaacgaaaaataaaaaaccaatcagcatttgatttaagcagagaatgtttgggatatccagaagcggattttataacgttagttaataacatgcggttcaaaatagaaaattgtaaggttgtaaatttcaatattgaaaatactaattgtttaaataacccgagtattgaaactatatatggaaactttaaccagttcgtctcaatctttaatgtcgtcaccgatgtcaaaaaaagattattcgagtgaaataatatgcgcctttgatataggtgcaaaaaatcctgccagaactgttttagaagtcaaggataactccgttagggtattggatatatcaaaattagactggagttctgattgggaaaggcgcatagctaaagatttgtcacaatatgaatacactacagttcttctagaacgtcagcctagaaggtcgccgtatgttaaatttatctattttattaaaggctttttatatcatacatcggctgccaaagttatttgcgtctcgcctgtcatgtctggtaattcatatagagatcgaaaaaagagatcggtcgaagcatttcttgattggatggacacattcggattgcgagactccgttccggatagacgcaaattagacgatgtagcggatagtttcaatttggctatgagatacgtattagataaatggaatactaattatacaccttataataggtgtaaatctagaaattacataaaaaaaatgtaataacgttagtaacgccattatggataatctatttacctttctacatgaaatagaagatagatatgccagaactatttttaactttcatctaataagttgcgatgaaataggagatatatatggtcttatgaaagaacgcatttcctcagaggatatgtttgataatatagtgtataataaagatatacatcctgccattaagaaactagtgtattgcgacatccaacttactaaacacattattaatcagaatacgtatccggtatttaacgattcttcacaagtgaaatgttgtcattatttcgacataaactcagataatagcaatattagctctcgtacagtagagatatttgagagggaaaagtcatctcttgtatcatatattaaaactaccaataagaagagaaaggtcaattacggcgaaataaagaaaactgttcatggaggcactaatgcaaattacttttccggtaaaaagtctgacgagtatctgagtactacagttagatccaacattaatcaaccttggatcaaaaccatctctaagaggatgagagttgatatcattaatcactctatagtaacgcgtggaaaaagctctatattacaaactatagaaattatttttactaatagaacatgtgtgaaaatattcaaggattctactatgcacattattctatccaaggacaaggatgaaaaggggtgtatacacatgattgacaaattattctatgtctattataatttatttctgttgttcgaagatatcatccaaaacgagtactttaaagaagtagctaatgttgtaaaccacgtactcacggctacggcattagatgagaaattattcctaattaagaaaatggctgaacacgatgtttatggagttagcaatttcaaaatagggatgtttaacctgacatttattaagtcgttggatcataccgttttcccctctctgttagatgaggatagcaaaataaagttttttaaggggaaaaagctcaatattgtagcattacgatctctggaggattgtataaattacgtgactaaatccgagaatatgatagaaatgatgaaggaaagatcgactattttaaatagcatagatatagaaacggaatcggtagatcgtctaaaagaattgcttctaaaatgaaaaaaaacactaattcagaaatggatcaacgactagggtataagtttttggtgcctgatcctaaagccggagttttttatagaccgttacatttccaatatgtatcgtattctaattttatattgcatcgattgcatgaaatcttgaccgtcaagcggccaatcttatcgtttaagaataatacagaacgaattatgatagaaattagcaatgttaaagtgactcctccagattactcacctataatcgcgagtattaaaggtaagagttatgacgcattagccacgttcactgtaaatatctttaaagaggtaatgaccaaagagggtatatccatcactaaaataagtagttatgagggaaaagattctcatttgataaaaattccgctactaataggatacgggaataaaaatccacttgatacagccaagtatcttgttcctaatgtcataggtggagtctttatcaataaacaatctgtcgaaaaagtaggaattaatctagtagaaaagattacaacatggccaaaatttagggttgttaagccaaactcattcactttctcgttttcctccgtatcccctcctaatgtattaccgacaagatatcgccattacaagatatctctggatatatcacaattggaagcgttgaatatatcatcgacaaagacatttataacggtcaatattgttttgctgtctcaatatttatctagagtgagtctagaattcattagacgtagtttatcatacgatatgcctccagaagttgtctatctagtaaacgcgataatagatagtgctaaacgaattactgaatctattactgactttaatattgatacatacattaatgacctggtggaagctgaacacattaaacaaaaatctcagttaacgattaacgagttcaaatatgaaatgctgcataactttttacctcatatgaactatacacccgatcaactaaagggattttatatgatatctttactaagaaagtttctctactgtatcttccacacttctagatatccagatagagattcgatggtttgtcatcgcatcctaacgtacggcaaatattttgagacgttggcacatgatgaattagagaattacataggcaacatccgaaacgatatcatgaacaatcacaagaacagaggcacttacgcggtaaacattcatgtactaacaactcccggacttaatcacgcgttttctagcttattgagtggaaagttcaaaaagtcagacggtagttatcgaacacatcctcactattcatggatgcagaatatttctattcctaggagtgttggattttatccggatcaagtaaagatttcaaagatgttttctgtcagaaaataccatccaagtcaatatctttacttttgttcatcagacgttccggaaagaggtcctcaggtaggtttagtatctcaattgtctgtcttgagttccattacaaatatactaacgtctgagtatttggatttggaaaagaaaatttgtgagtatatcagatcatattataaagatgatataagttactttgaaacaggatttccaatcactatagaaaatgctctagtcgcatctcttaatccaaatatgatatgtgattttgtaactgactttagacgtagaaaacggatgggattcttcggtaacttggaggtaggtattactttagttagggatcacatgaatgaaattcgcattaatattggagcgggaagattagtcagaccattcttggttgtggataacggagagctcatgatggatgtgtgtccggagttagaaagcagattagacgacatgacattctctgacattcagaaagagtttccgcatgtcatcgaaatggtagatatagaacaatttacttttagtaacgtatgtgaatcggttcaaaaatttagaatgatgtcaaaggatgaaagaaagcaatacgatttatgtgactttcctgccgaatttagagatggatatgtagcatcttcactagtgggaatcaatcacaattctggacccagagctattcttggatgtgctcaagctaaacaagctatctcttgtctgagttcggatatacgaaataaaatagacaatggaattcatttgatgtatccagagaggccaatcgtgattagtaaggctttagaaacttcaaagattgcggctaattgcttcggccaacatgttactatagcattaatgtcgtacaaaggtatcaatcaagaggatggaattatcatcaaaaaacaatttattcagagaggcggtctcgatattgttacagccaagaaacatcaagtagaaattccattggaaaactttaataacaaagaaagagataggtctaacgcctattcaaaattagaaagtaatggattagttagactgaatgctttcttggaatccggagacgctatggcacgaaatatctcatcaagaactcttgaagatgattttgctagagataatcagattagcttcgatgtttccgagaaatataccgatatgtacaaatctcgcgttgaacgagtacaagtagaacttactgacaaagttaaggtacgagtattaaccatgaaagaaagaagacccattctaggagacaaatttaccactagaacgagtcaaaagggaacagtcgcgtatgtcgcggatgaaacggaacttccatacgacgaaaatggtatcacaccagatgtcattattaattctacatccatcttctctagaaaaactatatctatgttgatagaagttattttaacagccgcatattctgctaagccgtacaacaataagggagaaaaccgacctgtctgttttcctagtagtaacgaaacatccatcgatacatatatgcaattcgctaaacaatgttatgagcattcaaatccgaaattgtccgatgaagaattatcggataaaatcttttgtgaaaagattctctatgatcctgaaacggataagccttatgcatccaaagtattttttggaccaatttattacttgcgtctgaggcatttaactcaggacaaggcaaccgttagatgtagaggtaaaaagacgaagctcattagacaggcgaatgagggacgaaaacgtggaggaggtatcaagttcggagaaatggagagagactgtttaatagcgcatggtgcagccaatactattacagaagttttgaaagattcggaagaagattatcaagatgtgtatgtttgtgaaaattgtggagacatagcagcacaaatcaagggtattaatacatgtcttagatgttcaaaacttaatctctctcctctcttaacaaaaattgataccacgcacgtatctaaagtatttcttactcaaatgaacgccagaggcgtaaaagtcaaattagatttcgaacgaaggcctccttcgttttataaaccattagataaagttgatctcaagccgtcttttctggtgtaatattctagtttggtagtagatacatatcaatatcatcaaattcgagatccgaattataaaatgggcgtggattgttaactatagaatcggacgtctgatattcgaaaatctgtggagtttcaggttttggtgaaggtgtaactgctacttgggatactgaagtctgatattcagaaagctgtggatgttctggttcgacatccaccgatggtgtcacatcactaatcggttcggtaacgtctgtggatggaggtgctacttctacagaacctgtagcctcagttgtcaacggagatacatttttaatgcgagaaaatgtataatttggtaatggtttcttatgtggatctgaagaagaggtaagatatctactagaaagataccgatcacgttctagttctcttttgtagaacttaactttttctttctccgcatctagttgatattccaacctcttcacgttactacgttcagattccaattcacgttcgcatgggttacctccgcagtttttacgagcgatttcacgttcagccttcatgcgtctctccctctctctatcgagtttatcagagcagtctttctgaaggcgatcgaactccataaatttctccaacgctttgattgtttccatagatttccgaagttcagcttttaggactgtgattctttttctttcgaattcacagctggatgtacaaccgtttccattaccgccatctctaagtttcttttctagatcggcaacatttcatccccatgccttttacattcctcgagtctactgtcgtcgaaatatcgttccagctccttttcgacatcaataactttagcacgttgtctctcaagctctcttttgtagttatctgattccctggcacgtttaagatcttcatgcaattgagtcagctcttaacttcctctcttgcttcttcgtcatagtacgcgcaatcactgtgagatccattgttaccacgtctacactcggcgagctcgcgtttaagagattcaatttcccgtttgtattggtccatgtttccattgctaccaccattagatttacaggctgctagttgtcgttcgagatcagaaatacgggttttcttggaattgatttcgtcgatgtacttggcatcgaaacacttattaagttctttttccaattctacgattttatttctttcgcgagtcaattccctcctgtagtaactatctgttttgtcagattcacgctctctacgtagactttcttgcaagttactaatttgttccctagcacgtccgagtttagttttatatgctgaatagagttctgattcatcctttgagcagatctctagcgatcgtttaagattcctaattctagtctttagcctatttacctcctcagaagatgttccgttaccgttgcgtttacactcgttaagctgtctatcaagatccatgattctatctctaagacgttgcatctctctttccatatcagcattgctttcattattacgtctgcagtcactcaactgtctttcaatatctgagattctatctctaagacgtcgcatctctctctgtttcggcattggtttcattattacgtttacagtcgttcaactgtctttcaagatctgatattctagattggagtctgctaatctctgtagcattttcacggcattcactcagttgtctttcaagatctgaaattttagattggagtctgctaatctctgtaagatttcctcctccgctctcgatgcagtcggtcaacttattctctagttctctaatacgcgaacgcagtgcatcaacttcttgcgtgtcttcctggttgcgtgtacattcatcgagatctctaacgcgtcgtcgttcttcctcaagttctctgcgtactacagaaagcgtgtccttatcttgttgatatttagcaatttctgattctagagtactgattttgcttacgtagttactaatatttgtcttggccttatcaagatcctccttgtatttgtcgcattccttgatatccctacgaagtctggacagttcccattcgacattacgacgtttatcgatttcagctcggagatcgtcatcgcgttgttttagccacatacgactgagttcaagttctcgttgacaagatccatctacttttccattcctaatagtatccagttccttttctagttctgaacgcatttctcgttccctatcaagcgattctctcaattctcggatagtcttcttatcaatttctaataaatctgaaccatcatctgtcccattttgaatatccctgtgttctttgatctcttttgtaagtcggtcgattctttcggttttataaacagaatccctttccaaagtcctaatcttactgagtttatcactaagttctgcattcaattcggtgagttttctcttggcttcttccaactctgttttaaactctccactatttccgcattcttcctcgcatttatctaaccattcaattagtttattaataactagttggtaatcagcgattcctatagccgttcttgtaattgtgggaacataattaggatcttctaatggattgtatggcttgatagcatcatctttatcattattagggggatggacaaccttaattggttggtcctcatctcctccagtagcgtgtggttcttcaataccagtgttagtaataggcttaggcaaatgcttgtcgtacgcgggcacttcctcatccatcaagtatttataatcgggttctacttcagaatattcttttctaagagacgcgacttcgggagttagtagaagaactctgtttctgtatctatcaacgctggaatcaatactcaagttaaggatagcgaatacctcatcgtcatcatccgtatcttctgaaacaccatcatatgacatttcatgaagtctaacgtattgataaatagaatcagatttagtattaaacagatccttaacctttttagtaaacgcatatgtatattttagatctccagatttcataatatgatcacatgccttaaatgtcagtgcttccatgatataatctggaacactaatgggtgacgaaaaagatacagcaccatatgctacgttgataaataaatctgaaccactaagtagataatgattaatgttaagaaagaggaaatattcagtgtataggtatgtcttggcgtcatatcttgtactaaacacgctaaacagtttgttaatgtgatcaatttccaatagattaattagagcagcgggaataccaacaaacatattaccacatccgtattttctatgaatatcacatatcatgttaaaaaatcttgatagaagagcgaatatctcgtctgacttaatgagtcgtagttcagcagcaacataagtcataactgtaaatagaacatactttcctgtagtgttgattctagactccacatcaacaccattattaaaaatagttttatatacatctttaatctgctctccgttaatcgtcgaacgttctagtatacggaaacactttgatttcttatctgtagttaatgacttagtgatatcacgaagaatattacgaattacatttcttgtttttcttgagagacctgattcagaactcaactcatcgttccatagtttttctacctcagtggcgaaatctttggagtgcttggtacatttttcaataaggttcgtgacctccatttattataaaaaatttattcaaaacttaactacaatcgggtaattataaaatcgtagatctcccatgtggcggaatactaccatctatcgcatgtggatggacagtaggtaatggccatgggaacagtaatgtttgcatatttatctttcttgccagtattactgcatattgtcccaatgtttcgatgtgatgttctaacctatcaactgccgctgtatcacaacaatagtgtccgatgaaattaagattatgatccaatgtgtttaatatatgattatcaagtcttatacgatccgcgtcttttttgacaggatcaggttcttctacaggaagaagtttcggcctcttatgatattcatgtctgggaaacggtggtctagggtgaggctccggtatcggagtgggttttggattataatcatcatcgtctatgacatcatcttcgacttcgatatttattttgctatcttgatgatgtcctgtatcagttgcattttcagcactcgactgaatattagcgcattcattgtctattattaccatatttctaaacccaaaatgtatgtgttgaacatcagtactatcgttgatgagtcttatagcatgaattcgcttatcgttatcgggtttatcttctgtcaccttagcaattccttttttattaaactctacataatcatatccatttctattgtttgttctaatataaacgagtatagcatcattgctaaatttttcaatagtatcaaaaacagaatatcctaaaccatataatatatattcaggaacactcaaactaaatgtccaggattctcctaaatacgtaaactttaatagtgcgaaatcattcaaaaatctaccacttatagatagatagtacataaatgcgtatagtagtctacctatctctttattatgaaaaccggcattacgatcatatatgtcgtgatatacctgtgatccgtttacgttaaaccataaatacatgggtgatcctataaacatgaatttatttctaattctcagagctatagttaattgaccgtgtaatatttgcttacatgcatacttgatacgcttattaataagatttttatcattgctcgttatttcagaatcgtatatataaggagtaccatcgtgattcttaccagatattatacaaaatactatatataaaatatattgacccacgttagtaatcatataaatgtttaacgttttaaattttgtattcaatgatccattatcatacgctatcatggtcttgtaatattcattctttaaaatataatattgtgttagccattgcattggagctcctaatggagattttctattctcatccattttaggataggctttcataaagtccctaataacttcgtgaataatgtttctatgttttctactgatgcatgtatttgcttcgatttttttatcccatgtttcatctatcatagatttaaacgcagtaatgctcgcaacattaacatcttgaaccgttggtacaattccgttccataaatttataatgttcgccatttatataactcattttttgaatatacttttaattaacaaaagagttaagttactcatatggacgccgtccagtctgaacatcaatctttttagccagagatatcatagccgctcttagagtttcagcgtgattttccaacctaaatagaacttcatcgttgcgtttacaacacttttctatttgttcaaactttgttgttacattagtaatctttttttccaaattagttagccgttgtttgagagtttcctcattgtcgtcttcatcggctttaacaattgcttcgcgtttagcctctggctttttagcagcctttgtagaaaaaaattcagttgctggaattgcaagatcgtcatctccggggaaaagagttccgtccatttaaagtacagattttagaaactgacactctgcgttatttatatttggtacaacacatggattataaatattgatgttaataacatcagaaaatgtaaagtctatacattgttgcatcgtgttaaattttctaatggatctagtattattgggtccaacttctgcctgaaatccaaatatggaagcggatacaaaaccgtttcctggataaaccacacatctccacttttgctttacatcagaaattgtgtcgttgacatcttgaactctcctatctaatgccggtgttccacctatagattttgaatattcgaatgctgcatgagtagcattaaattccttaatattgccataattttcatatattgagtaaccctggataaaaagtaaacacaccgcagccgtcgctaccacaataaaaaaaattgatagagagttcatttataatctattagaagctgacaaaatttttttacacgcatcagacaatgctttaataaatagttcaacatctacttttgtcatatcgaaccgatggtatgattctaacctagaattacatccgaaaaagttgactatgttcatagtcattaagtcattaacaaacaacattccagactctggattataagacgatactgtttcgtcacaattacctaccttaatcatgtgattatgaatattggctattagagcaccttctaagaaatctataatatctttgaaacacgatttaaaatcaaaccacgaatatacttctacgaagaaagttagtttacccataggagaaataactataaatggagatctaaatacaaaatccggatctatgatagttttaacattattatattctctattaaatacctccacatctaaaaatgttaattttgaaactatgtcttcgtttattaccgtacctgaactaaacgctataagctctattgtttgagaactctttaaacgatattcttgaaatacatgtaacaaagtttcctttaactcggtcggtttatctaccatagttacagaatttgtatccttatctataatataataatcaaaatcgtataaagttatataattatcgcgttcagattgggatcttttcaaatagactaaaaaccccatttctctagtaagtatcttatgtatatgtttgtaaaatatcttcatggtgggaatatgctctaccacagttagccattcctcattgacagcggtagatgtattagacaaaactattccaatgtttaacaagggccattttacgagattattaaatccttgtttgataaatgtagccaatgagggttcgagttcaacgacgattgaattctcttcccgcggatgctgcatgatgaacgacgggatgttgttcgattgatttggaattctttttcgactttttgtttatattaaatattttaaaatttatagcggatagcaattcatgtaccacggataatgtagacgcgtattgcgcatcgatatctttattattagataaatttatcaataaatgtgagaagtttgcctcgttaaggtcttccatttaaatattatataaacatttgtgtttgtaacttattcgtcttttatggaatagttttttactagtaaagctgcaattacacactttgtccgtaaaacataaatataaacaccagcttttatcaatcgttccaaaaagtcgacggcggacatttttaacatggcatctattttaaatacacttaggtttttggaaaaaacatcattttataattgtaacgattcaataactaaagaaaagattaagattaaacataagggaatgtcatttgtattttataagccaaagcattctaccgttgttaaatacttgtctggaggaggtatatatcatgatgatttggttgtattggggaaggtaacaattaataatctaaagatgatgctattttacatggatttatcatatcatggagtgacaagtagtggagcaatttacaaattgggatcgtctatcgatagactttctctaaataggactattgttacaaaagttaataattatgatgatacattttttgacgacgatgattgatcgctattgcacaattttgtttttgtactttctaatatagtgtttaggttctttttcatatgagaatattgatttactaaaatatctatgtttaacttttgttctatgacgtccttatcggcggtatcggtacatatacgtaattcaccttcacaaaatacggagtcttcgataataatagccaatcgattattggatctagctgtctgtatcatattcaacatgtttaatatatcctttcgtttcccctttacaggcatcgatcgtagcatattttccgcgtctgatatggaaatgttaaaactacaaaaatgcgtaatgttagcccgtcctaatattggtacgtgtctataagtttggcatagtagaataatagacgtgtttaaatgccttccaaagtttaagaattctattagagtattgcattttgatagtttatcgcctacatcatcaaaaataagtaaaaagtgtgctgattttttatgattttgtgcgacagcaatacatttttctatgttacttttagttcgtatcagattatattctagagattcctgactactaacgaaattaatatgatttggccaaatgtatccatcataatctgggttataaacgggtgtaaacaagaatatatgtttatattttttaactagtgtagaaaacagagatagtaaatagatagtttttccagatccagatcctcccgttaaaaccattctaaacggcatttttaataaattttctcttgaaaattgtttttcttggaaacaattcataattatatttacagttactaaattaatttgataataaatcaaaatatggaaaactaaggttgttagtagggaggagaacaaagaaggcacatcgtgatataaataacatttattatcatgatgacaccagaaaacgacgaagagcagacatctgtgttctccgctactgtttacggagacaaaattcagggaaagaataaacgcaaacgcgtgattggtctatgtattagaatatctatggttatttcactactatctatgattaccatgtccgcgtttctcatagtgcgcctaaatcaatgcatgtctgctaacgaggctgctattactgacgccgctgttgccgttgctgctgcatcatctactcatagaaaggttgcgtctagcactacacaatatgatcacaaagaaagctgtaatggtttatattaccagggttcttgttatatattacattcagactaccagttattctcggatgctaaagcaaattgcactgcggaatcatcaacactacccaataaatccgatgtcttgactacctggctcattgattatgttgaggatacatggggatctgatggtaatccaattacaaaaactacatccgattatcaagattctgatgtatcacaagaagttagaaagtatttttgtgttaaaacaatgaactaatatttatttttgtacattaataaatgaaatcgcttaatagacaaactgtaagtaggtttaagaagttgtcggtgccggccgctataatgatgatactctcaaccattattagtggcataggaacatttctgcattacaaagaagaactgatgcctagtgcttgcgccaatggatggatacaatacgataaacattgttatttagatactaacattaaaatgtctacagataatgcggtttatcagtgtcgtaaattacgagctagattgcctagacctgatactagacatctgagagtattgtttagtattttttataaagattattgggtaagtttaaaaaagaccaatgataaatggttagatattaataatgataaagatatagatattagtaaattaacaaattttaaacaactaaacagtacgacggatgctgaagcgtgttatatatacaagtctggaaaactggttaaaacagtatgtaaaagtactcaatctgtactatgtgttaaaaaattctacaagtgacaacaaaaaatgaattaataataagtcgttaacgtacgccgccatggacgccgcgtttgttattactccaatgggtgtgttgactataacagatacattgtatgatgatctcgatatctcaatcatggactttataggaccatacattataggtaacataaaaactgtccaaatagatgtacgggatataaaatattccgacatgcaaaaatgctactttagctataagggtaaaatagttcctcaggattctaatgatttggctagattcaacatttatagcatttgtgccgcatacagatcaaaaaataccatcatcatagcatgcgactatgatatcatgttagatatagaagataaacatcagccattttatctattcccatctattgatgtttttaacgctacaatcatagaagcgtataacctgtatacagctggagattatcatctaatcatcaatccttcagataatctgaaaatgaaattgtcgtttaattcttcattctgcatatcagacggcaatggatggatcataattgatgggaaatgcaatagtaattttttatcataaaagttgtaaagtaaataataaaacaataaatattgaactagtagtacgtatattgagcaatcagaaatgatgctggtacctcttatcacggtgaccgtagttgcgggaacaatattagtatgttatatattatatatttgtaggaaaaagatacgtactgtctataatgacaataaaattatcatgacaaaattaaaaaagataaagagttctaattccagcaaatctagtaaatcaactgatagcgaatcagactgggaggatcactgtagtgctatggaacaaaacaatgacgtagataatatttctaggaatgagatattggacgatgatagcttcgctggtagtttaatatgggataacgaatccaatgttatggcgcctagcacagaacacatttacgatagtgttgctggaagcacgctgctaataaataatgatcgtaatgaacagactatttatcagaacactacagtagtaattaatgaaacggagactgttgaagtacttaatgaagataccaaacagaatcctaactattcatccaatcctttcgtaaattataataaaaccagtatttgtagcaagtcaaatccgtttattacagaacttaacaataaatttagtgagaataatccgtttagacgagcacatagcgatgattatcttaataagcaagaacaagatcatgaacacgatgatatagaatcatcggtcgtatcattggtgtgattagtttcctttttataaaattgaagtaatatttagtattattgctgccgtcacgttgtacaaatggagatattccctgtattcggcatttctaaaattagcaattttattgctaataatgactgtagatattatatagatacagaacatcaaaaaattatatctgatgagatcaatagacagatggatgaaacggtacttcttaccaacatcttaagcgtagaagttgtaaatgacaatgagatgtaccatcttattcctcatagattatcgacgattatactctgtattagttctgtcggaggatgtgttatctctatagataatgacatcaatggcaaaaatattctaacctttcccattgatcatgctgtaatcatatccccactgagtaaatgtgtcgtagttagcaagggtcctacaaccatattggttgttaaagcggatatacctagcaaacgattggtaacatcgtttacaaacgacatactatatgtaaacaatctgtcactgattaattatttgccgttgtctgtattcattattagacgagtcaccgactatttggatagacacatatgcgatcagatatttgctaataataagtggtattcccttataaccatcgacgataagcaatatcctattccatcaaactgtataggtatgtcctctgccaagtacataaattctagcatcgagcaagatactttaatccatgtttgtaacctcgagcatccgttcgactcagtatacaaaaaaatgcagtcgtacaattctctacctatcaaggaacaaatattgtacggtagaattgataatataaatatgagcattagtatttctgtggattaatagatttctagtatggggatcattaatcatctctaatctctaaatacctcataaaacgaaaaaaaagctattatcaaatactgtacggaatggattcattctcttctctttttatgaaactctgttgtatatctactgataaaactggaagcaaaaaatctgatagaaagaataagaataagatcaaggattatatggaacacgattattataaaataacaatagttcctggttcctcttccacgtctactagctcgtggtattatacacatgcctagtaatagtctctttgcgttgacggaaagcagactagaaataacaggctaaaatgttcagacaccataatagttcccaacccagataataacagagttccatcaacacattcctttaaactcaatcccaaacccaaaaccgttaaaatgtatccggccaattgatagtagataatgaggtgtacagcgcatgataatttacacagtaaccaaaatgaaaatactttagtaattataagaaatatagacggtaatgtcatcatcaacaatccgataatatgcctgagagtaaacattgacggataaaacaaaaatgctccgcataactctatcatggcaataacacaaccaaatacttgtaagattcctaaattagtagaaaatacaacgaatatcgatgtataagtgatctcgagaaataataagaataaagtaatgcccgtaaagataaacatcaacattgtttggtaatcattaaaccaattagtatgaagttgaactaatttcacagtagattttattccagtgttatcctcgcatgtataagtacctggtaagatatctttatattccataatcaatgagacatcactatctgataacgaatgaagtctagcactagtatgccatttacttaatatggtcgtcttggaagttttattataagttaaaatatcatggttatccaatttccatctaatatactttgtcggattatctatagtacacggaataatgatggtatcattacatgctgtatactctatggtctttgtagttgttataacaaccaacgtatagaggtatatcaacgatattctaactcttgacattttttatttatttaaaatgatacctttgttatttattttattctattttgctaacggtattgaatggcataagtttgaaacgagtgaagaaataatttctacttacttattagacgacgtattatacacgggtgttaatggggcggtatacacattttcaaataataaactaaacaaaactggtttaactaataataattatataacaacatctataaaagtagaggatgcggataaggatacattagtatgcggaaccaataacggaaatcccaaatgttggaaaatagacggttcagacgacccaaaacatagaggtagaggatacgctccttatcaaaatagcaaagtaacgataatcagtcacaacggatgtgtactatctgacataaacatatcaaaagaaggaattaaacgatggagaagatttgacggaccatgtggttatgatttatacacggcggataacgtaattccaaaagatggtttacgaggagcattcgtcgataaagacggtacttatgacaaagtttacattcttttcactgatactatcggctcaaagagaattgtcaaaattccgtatatagcacaaatgtgcctaaacgacgaaggtggtccatcatcattgtctagtcatagatggtcgacgtttctcaaagtcgaattagaatgtgatatcgacggaagaagttatagacaaattattcattctagaactataaaaacagataatgatacgatactatatgtattcttcgatagtccttattccaagtccgcattatgtacctattctatgaataccattaaacaatctttttctacgtcaaaattggaaggatatacaaagcaattgccgtctccagctcctggtatatgtttaccagctggaaaagttgttccacataccacgtttgaagtcatagaacaatataatgtactagatgatattataaagcctttatctaaccaacctatcttcgaaggaccgtctggtgttaaatggttcgatataaaggagaaggaaaatgaacatcgggaatatagaatatacttcataaaagaaaattctatatattcgttcgatacaaaatctaaacaaactcgtagctcgcaagtcgatgcgcgactattttcagtaatggtaactgcgaaaccgttatttatagcagatatagggataggagtaggaatgccacaaatgaaaaaaatacttaaaatgtaatcttaatcgagtacaccacacgacaatgaacaaacataagacagattatgctggttatgcttgctgcgtaatatgcggtctaattgtcggaattatttttacagcgacactattaaaagttgtagaacgtaaattagttcatacaccattaatagataaaacgataaaagatgcatatattagagaagattgtcctactgactggataagctataataataaatgtatccatttatctactgatcgaaaaacctgggaggaaggacgtaatgcatgcaaagctctaaattcaaattcggatctaattaagatagagactccaaacgagttaagttttttaagaagccttagacgaggctattgggtaggagaatccgaaatattaaaccagacaaccccatataattttatagctaagaatgccacgaagaatggaactaaaaaacggaaatatatttgtagcacaacgaatactcccaaactgcattcgtgttacactatataacaattacactacatttttatcataccactacttcggttagatgttttagaaaaaaataaatatcgccgtaccgttcttgtttttataaaaataacaattaacaattatcaaattttttctttaatattttacgtggttgaccattcttggtggtaaaataatctcttagtgttggaatggaatgctgtttaatgtttccacactcatcgtatattttgacgtatgtagtcacatcgtttacgcaatagtcagactgtagttctatcatgcttcctacatcagaaggaggaacagttttaaagtctcttggttttaatctattaccgttagttttcatgaaatcctttgttttatccacttcacattttaaataaatgtccactatacattcttttgttaattttactagatcgtcatgggtcatagaatttataggttccgtagtccatggatccaaactagcaaacttcgcgtatacggtatcgcgattagtgtatacaccaactgtatgaaaattaagaaaacagtttaataaatcaacagaaatatttaatcctccgtttgatacagatgcgccatatttatggatttcggattcacacgttgtttgtctgaggtgttcgtctagtgttgcttctacgtaaacttcgattcccatatattctttattgtcagaatcgcataccgatttatcatcatacactgtttgaaaactaaatggtatacacatcaaaataataaataataacgagtacattctgcaatattgttatcgtaattggaaaaatagtgttcgagtgagttggattatgtgagtattggattgtatattttattttatattttgtaataagaataaaatgctaatgtcaagtttattccaatagatgtcttattaaaaacatatataataaataacaatggctgaatggcataaaattatcgaggatatctcaaaaaataataagttcgaggatgccgccatcgttgattacaagactacaaagaatgttctagctgctattcctaacagaacatttgccaagattaatccgggtgaaattattcctctcatcactaatcgtaatattctaaaacctcttattggtcagaaatattgtattgtatatactaactctctaatggatgagaacacgtatgctatggagttgcttactgggtacgcccctgtatctccgatcgttatagcgagaactcataccgcacttatatttttgatgggtaagccaacaacatccagacgtgacgtgtatagaacgtgtagagatcacgctacccgtgtacgtgcaactggtaattaaaataaaaagtaatattcatatgtagtgtcaattttaaatgatgatgatgaaatggataatatccatattgacgatgtcaataatgccggtattggcatacagttcatcgatttttagatttcattcagaggatgtggaattatgttatgggcatttgtattttgataggatctataatgtagtaaatataaaatataatccgcatattccatatagatataattttattaatcgcacgttaaccgtagatgaactagacgataatgtcttttttacacatggttattttttaaaacacaaatatggttcacttaatcctagtttgattgtctcattatcaggaaacttaaaatataatgatatacaatgctcagtaaatgtatcgtgtctcattaaaaatttggcaacgagtacatctactatattaacatctaaacataagacttattctctacatcggtccacgtgtattactataataggatacgattctattatatggtataaagatataaatgacaagtataatgacatctatgattttactgcaatatgtatgctaatagcgtctacattgatagtgaccatatacgtgtttaaaaaaataaaaatgaactcttaattatgctatgctattagaaatggataaaatcaaaattacggttgattcaaaaattggtaatgttgttaccatatcgtataacttggaaaagataactattgatgtcacacctaaaaagaaaaaagaaaaggatgtattattagcgcaatcagttgctgtcgaagaggcaaaagatgtcaaggtagaagaaaaaaatattatcgatattgaagatgacgatgatatggatgtagaaagcgcgtaatactatctataaaaataagtatataataaatactttttatttacggtactcttgtagtggtgataccctactcgattatttttttaaaaaaatacttattctgattcttctaaccatttccgtgttcgtttgaatgccacatcgacgtcaaagataggggagtagttgaaatctagttctgcattgttggtacgcacctcaaatgtagtgttggatatcttcaacgtatagttgttgagtagtgatggttttctaaatagaattctcttcatatcattcttgcacgcgtacatttttagcatccatcttggaattctagatccttgttctattcccaatggtttcatcaatagaagattaaacatatcgtacgaacacgatggagagtaatcgtagcaaaagtaagcatttcctttaatctcagatcccggatactggatatattttgcagccaacacgtgcatccatgcaacatttcctacatatacccggctatgcaccgcgtcatcatcgactgtacgatacataatgttaccgtgttgcttacattgctcgtaaaagactttcgtcaatttgtctccttctccgtaaattctagtgggtcttaggcaacaagtatacaattttgctccattcatgattacggaattattggctttcataaccagttgctcggccatacgtttactttttgcgtatacatgtcctggtgatatatcataaagggtatgctcatggccgatgaatggatcaccgtgtttattgggtcctattgcttccatgctactagtatagatcaaatacttgattcctaggtccacacaagctgccaaaatagtctgtgttccataatagtttactttcatgatttcattatcggtgtattttccaaatacatccactagagcagccgtatgaataatcagatttaccccatctagcgcttctctcaccttatcaaagtcgtttatatcacattgtatatagtttataaccttaactttcgaggttattggttgtggatcttctacaatatctatgactctgatttcttgaacatcatctgcactaattaacagttttactatatacctgcctagaaatccggcaccaccagtaaccgcgtacacggccattgctgccactcataatatcagactacttattctattttactaaataatggctgtttgtataatagaccacgataatatcagaggagttatttactttgaaccagtccatggaaaagataaagttttaggatcagttattggattaaaatccggaacgtatagtttgataattcatcgttacggagatattagtcaaggatgtgattccataggcagtccagaaatatttatcggtaacatctttgtaaacagatatggtgtagcatatgtttatttagatacagatgtaaatatatctacaattattggaaaggcgttatctatttcaaaaaatgatcagagattagcgtgtggagttattggtatttcttacataaatgaaaagataatacattttcttacaattaacgagaatggcgtttgatatatcagttaatgcgtctaaaacaataaatgcattagtttacttttctactcagcaaaataaattagtcatacgtaatgaagttaatgatacacactacactgtcgaatttgatagggacaaagtagttgacacgtttatttcatataatagacataatgacaccatagaaataagaggggtgcttccagaggaaactaatattggttgcgcggttaatacgccggttagtatgacttacttgtataataagtatagttttaaactgattttagcagaatatataagacacagaaatactatatccggcaatatttattcggcattgatgacactagatgatttggctattaaacagtatggagacattgatctattatttaatgagaaacttaaagtagactccgattcgggactatttgactttgtcaactttgtaaaggatatgatatgttgtgattctagaatagtagtagctctatctagtctagtatctaaacattgggaattgacaaataaaaagtataggtgtatggcattagccgaacatatatctgatagtattccaatatctgagctatctagactacgatacaatctatgtaagtatctacgcggacacactgagagcatagaggatgaatttgattattttgaagacgatgattcgtctacatgttctgccgtaaccgacagggaaacggatgtataattttttttatagcgtgaaggatatgataaaaaatataattgttgtatttatcccattctaatcaccttatatgattctgtaacacaataaaggagtctcatagatgtatagaggtcagatactggtttgataaactgtttattccacataagtatgtttgactttatggttagacccgcatactttaacaaatcactgaaaattggagttaggtattgacctctcagaatcagttgccgttctggaacattaaatgtattttttatgatatactccaacgcatttatgtgggcatacaacaagtcattactaatggagtattccaagagttttagttgtctagtatttaacaagagaagagatttcaacagactgtttatgaactcgaatgccgcctcattgtcgcttatattgatgatgtcgaattctcccaatatcatcaccgatgagtagctcatcttgttatcgggatccaagttttctaaagatgtcattaaaccctcgatcatgaatggatttatcatcatcgtttttatgttggacatgagcttagtccgtttgtccacatctatagacgacgatttctgaattatttcatatatccctctctttaactccaggaacttgtcaggatggtctactttaatatgttctcgtctaagagatgaaaatctttggatggtcgcacgcgacttttctctaaaggatgatgttgcccaagatcctctcttaaatgaatccatcttatccttggacaagatggacagtctattttccttagatggtttaatatttttgttacccatgatctataaaggtagacctaatcgtctcggatgacctatatatttattttcagttttattatacgcataaattgtaaaaaatatgttaggtttacaaaaatgtctcgtggggcattaatcgtttttgaaggattggacaaatctggaaaaacaacacaatgtatgaacatcatggaatctataccggcaaacacgataaaatatcttaactttcctcagagatccactgtcactggaaagatgatagatgactatctaactcgtaaaaaaacctataatgatcatatagttaatctattattttgtgcaaatagatgggagtttgcatcttttatacaagaacaactagaacagggaattactttaatagttgatagatacgcattttctggagtagcgtatgccgccgctaaaggcgcgtcaatgactctcagtaagagttatgaatctggattgcctaaacccgacttagttatattcttggaatctggtagcaaagaaattaatagaaacgtcggcgaggaaatttatgaagatgttacattccaacaaaaggtattacaagaatataaaaaaatgattgaagaaggagatattcattggcaaattatttcttctgaattcgaggaagatgtaaagaaggagttgattaagaatatagttatagaggctatacacacggttactggaccagtggggcaactgtggatgtaatagtgaaattacattttttataaatagatgttagtacagtgttataaatggatgaagcatattactctggcaacttggaatcagtactcggatacgtgtccgatatgcataccgaactcgcatcaatatctcaattagttattgccaagatagaaactatagataatgatatattaaacaaggacattgtaaattttatcatgtgtagatcaaacttggataatccatttatctctttcctagatactgtatatactattatagatcaagagaactatcagactgagttgattaattcattagacgacaatgaaattatcgattgtatagttaataagtttatgagcttttataaggataacctagaaaatatagtagatgctatcattactctaaaatatataatgaataatccagattttaaaactacgtatgcagaagtactcggttccagaatagccgatatagatattaaacaagtgatacgtaagaatatactacaattgtctaatgatatccgcgaacgatatttgtgaaaaatattaaaaaaaaatactttttttattaaatgacgtcgcttcgcgaatttagaaaattatgctgtgatatatatcacgcatcaggatataaagaaaaatctaaattaattagagactttataacagatagggatgataaatatttgatcattaagctattgcttcccggattagacgatagaatttataacatgaacgataaacaaattataaaattatatagtataatatttaaacaatctcaggaagatatgctacaagatttaggatacggatatataggagacactattaggactttcttcaaagagaacacagaaatccgtccacgagataaaagcattttaactttagaagacgtggatagtttcttaactacgttatcatccgtaactaaagaatcgcatcaaataaaattattgactgatattgcatccgtttgtacatgtaatgatttaaaatgtgtagtcatgcttattgataaagatctaaaaattaaagcgggtcctcggtacgtacttaacgctattagtcctcatgcctatgatgtgtttagaaaatctaataacttgaaagagataatagaaaattcatctaaacaaaatctagactctatatctatttctgttatgactccaattaatcccatgttagcggaatcgtgtgattctgtcaataaggcgtttaaaaaatttccatcaggaatgtttgcggaagtcaaatacgatggtgaaagagtacaagttcataaaaataataacgagtttgccttctttagtagaaacatgaaaccagtactctctcataaagtggattatctcaaagaatacataccgaaagcatttaaaaaagctacgtctatcgtattggattctgaaattgttcttgtagacgaacataatgtaccgctcccgtttggaagtttaggtatacacaaaaagaaagaatataaaaactctaacatgtgtttgttcgtgtttgactgtttgtactttgatggattcgatatgacggacattccattgtacgaacgaagatcttttctcaaagatgttatggttgaaatacccaatagaatagtattctcagagttgacgaatattagtaacgagtctcagttaactgacgtattggatgatgcactaacgagaaaattagaaggattggtcttaaaagatattaatggagtatacgaaccgggaaagagaagatggttaaaaataaagcgagactatttgaacgagggttccatggcagattctgccgatttagtagtactaggtgcctactatggtaaaggagcaaagggtggtatcatggcagtctttctaatgggttgttacgacgatgaatccggtaaatggaagacggttaccaagtgttcaggacacgatgataatacgttaagggagttgcaagaccaattaaagatgattaaaattaacaaggatcccaaaaaaattccagagtggttagtagttaataaaatctatattcccgattttgtagtagaggatccgaaacaatctcagatatgggaaatttcaggagcagagtttacatcttccaagtcccataccgcaaatggaatatccattagatttcctagatttactaggataagagaggataaaacgtggaaagaatctactcatctaaacgatttagtaaacttgactaaatcttaatagttacatacaaactgaaaattaaaataacactatttagttggtggtcgccatggatggtgttattgtatactgtctaaacgcgctagtaaaacatggcgaggaaataaatcatataaaaaatgatttcatgattaaaccatgttgtgaaagagtttgtgaaaaagtcaagaacgttcacatcggcggacaatctaaaaacaatacagtgattgcagatttgccatatctggataatgctgtatcggatgtatgcaattcactgtataaaaagaatgtatcaagaatatccagatttgctaatttgataaagatagatgacgatgacaagactcctactggtgtatataattattttaaacctaaagatgccattcctgttatcatatctataggaaaggataaagatgtctgtgaactattaatctcatcagacatatcgtgtgcatgcgtggagttaaattcatatcacgtagccattcttcccatggatgtttccttttttaccaaaggaaatgcatcattgattattctcctgtttgatttctctatcgatgcggcacctctcttaagaagtgtaaccgataataatgttattatatctagacaccagcgtctacatgacgagcttccgagttccaattggttcaagttttacataagtataaagtccgactattgttctatattatatatggttgttgatggatctgtgatgcatgcgatagctgataatagaactcacgcaattattagcaaaaatatattagacaatactacgattaacgatgagtgtagatgctgttattttgaaccacagattaggattcttgatagagatgagatgctcaatggatcatcgtgtgatatgaacagacattgtattatgatgaatttacctgatgtaggcgaatttggatctagtatgttggggaaatatgaacctgacatgattaagattgctctttcggtggctggtaatttaataagaaatcgagactacattcccgggagacgaggatatagctactacgtttacggtatagcctctagataatttttttaagcacgaaataaaaaacataattttaaaccaatctatttcatactattttgtgtgatcaccatggacataaagatagatattagtatttctggtgataaatttacggtgactactaggagggaaaatgaagaaagaaaaaaatatctacctctccaaaaagaaaaaactactgatgttatcaaacctgattatcttgagtacgatgacttgttagatagagatgagatgtttactattctagaggaatattttatgtacagaggtctattaggcctcagaataaaatatggacgactctttaacgaaattaaaaaattcgacaatgatgcggaagaacaattcggtactatagaagaactcaagcagaaacttagattaaattctgaagagggagcagataactttatagattatataaaggtacaaaaacaggatatcgtcaaacttactgtatacgattgcatatctatgataggattgtgtgcatgcgtggtagatgtttggagaaatgagaaactgttttctagatggaaatattgtttacgagcgattaaactgtttattaatgatcacatgcttgataagataaaatctatactgcagaatagactagtatatgtggaaatgtcatagaaagttaaaagttaatgagagcaaaaatatataaggttgtattccatatttgttatttttttctgtaatagttagaaaaatacattcgatggtctatctatcagattattatgtgttataaggtactttttctcataataaactagagtatgagtaagatagtgtttttcaaaacatataaatctaaaattgatggatgagatatacagctattaatttcgaaaatatattttaatctgataactttaaacatggatttttaatggtggtttaacgttttaaaaaaagattttgttattgtagtatatgataatattaaaagatggatataaagaatttgctgactgcatgtactattttttacattactacattggctacggcagatatacctacttcgtcactgccacacgctccggtaaacggggcatgtgacgagggagaatatcttgataagaggcataatcaatgttgtaatcagtgtccacctggagaatttgccaaggtcagatgtaatggtaacgataacacaaaatgtgaacgctgcccacctcatacatataccgcaatccccaattactctaatggatgtcatcaatgtagaaaatgcccaacaggatcatttgataaggtaaagtgtaccggaacacagaacagtaaatgttcgtgtcttcctggttggtattgcgctactgattcttcacagactgaagattgtcgagattgtataccaaaaaggagatgtccatgcggatactttggtggaatagatgaacaaggaaatcctatttgtaaatcgtgttgtgttggtgaatattgcgactacctacgtaattatagacttgatccatttcctccatgcaaactatctaaatgtaattaattatgattttgatgataatgttaccatacattatatcgctacttggttagtgtattattcagtatgaagacctattaataattacttatcttttgacgatcttgttataattataatataaaaatacttatggcatagtaactcataattgctgacgcgataaattcgtaataatctgttttgttcaaatttttataaggaatctacaggcataaaaataaaaatataatttataatatactcttacagcgcgccatcatgaataacagcagtgaattgattgctgttattaatggatttagaaatagtggacgattttgtgatattaatatagttattaatgatgaaaggataaacgctcataaactcatcctatctggagcctccgaatatttttccattctgttttccaataattttatcgattctaatgaatacgaagttaatctaagtcatttagattatcaaagcgtaaacgatttgatcgattacatttatgggatacctttgagcctaactaacgataacgtgaaatatattctttcaaccgctgattttttacaaattggatctgctattacggagtgtgaaaattacatacttaaaaatctttgttctagaaactgtatcgatttctacatatacgctgataaatataataacaagaaaatagaatcagcgtcgtttaacacaatattacaaaatattttgagactcatcaacgatgaaaactttaaatacttaacagaggaatcaatgataaaaattttaagcgatgatatgttaaatataaaaaatgaggatttcgccccactaattctcattaaatggttagagagtactcaacaaccatgcaccgtcgagttacttaaatgcctcagaatatcattgctttccccacaagttataaaatcactttatagtcatcgactggttagttcaatctacgaatgtataacattcttaaacaatatagcattcttggatgaatcatttcctagataccatagcatcgagttgatatctatcggtataagtaattcgcatgataagatttccataaactgctacaatcataaaaaaaatacatgggaaatgatatcttcacgtagatataggtgtagtttcgcagtggccgtcctggataatattatttatatgatgggtggatatgatcagtccccgtatagaagttcaaaggttatagcgtacaatacatgtacaaattcttggatatatgatataccagagctaaaatatcctcgttctaattgtgggggactggctgatgacgaatacatttattgtataggcggcatacgcgatcaggattcatcgttgacatctagtattgatagatggaagccatcaaaaccatattggcagaagtatgctaaaatgcgcgaaccaaaatgtgatatgggggttgcgatgttaaacggattaatatatgttataggtggaatcgttaaaggtgacacgtgtaccgacgcactagagagtttatcagaagatggatggatgaagcatcaacgtcttccaataaaaatgtccaatatgtcgacgattgttcatgatggcaagatttatatatctggaggttacaacaatagtagtgtagttaatgtaatatcgaatttagtccttagctataattcgatatatgatgaatggaccaaattatcatcattaaacattcctagaattaatcccgctctatggtcagcgcataataaattatatgtaggaggaggaatatctgatgatgttcgaactaatacatctgaaacatacgacaaagaaaaagattgttggacattggataatggtcacgtgttaccacgcaattatataatgtataaatgcgaaccgattaaacataaatatccattggaaaaaacacagtacacgaatgattttctaaagtatttggaaagttttataggtagttgatagaacaaaatacataattttgtaaaaataaatcactttttatactaatatgacacgattaccaatacttttgttactaatatcattagtatacgctacaccttttcctcagacatctaaaaaaataggtgatgatgcaactctatcatgtaatcgaaataatacaaatgactacgttgttatgagtgcttggtataaggagcccaattccattattcttttagctgctaaaagcgacgtcttgtattttgataattataccaaggataaaatatcttacgactctccatacgatgatctagttacaactatcacaattaaatcattgactgctagagatgccggtacttatgtatgtgcattctttatgacatcgcctacaaatgacactgataaagtagattatgaagaatactccacagagttgattgtaaatacagatagtgaatcgactatagacataatactatctggatctacacattcaccggaaactagttctgagaaacctgattatatagataattctaattgctcgtcggtattcgaaatcgcgactccggaaccaattactgataatgtagaagatcatacagacaccgtcacatacactagtgatagcattaatacagtaagtgcatcatctggagaatccacaacagacgagactccggaaccaattactgataaagaagatcatacagtcacagacactgtctcatacactacagtaagtacatcatctggaattgtcactactaaatcaaccaccgatgatacgtacaatgataatgatacagtaccaccaactactgtaggcggtagtacaacctctattagcaattataaaaccaaggactttgtagaaatatttggtattaccgcattaattatattgtcggccgtggcaatattctgtattacgtattatatatgtaataaacgttcacgtaaatacaaaacagagaacaaagtctagatttttgacttacataaatgtctgggatagtaaaatctatcatattgagcgggccatctggtttaggaaagacagccatagccaaaagactatgggaatatatttggatttgtggtgtcccataccactagatttcctcgtcctatggaacgagaaggtgtcgattaccattacgttaacagagaggccatctggaagggaatagccgccggaaactttctagaacatactgagtttttaggaaatatttacggaacttctaaaactgctgtgaatacagcggctattaataatcgtatttgtgtgatggatctaaacatcgatggcgttagaagtcttaaaaatacgtacctaatgccttactcggtgtatataagacctacctctcttaaaatggttgagaccaagcttcgttgtagaaacactgaagcggatgatgagattcatcgtcgtgtgatgttggcaaaaactgacatggatgaggcaggtgaagccggtctattcgacactattatcattgaagatgatgtgaatttagcatatagtaagttaattcagatactacaggaccgtattagaatgtattttaacactaattagagacttaagacttaaaacttgataattaataatataactcgtttttatatgtggctatttcaacgtctaatgtattagttaaatattaaaacttaccacgtaaaacttaaaatttaaaatgatatttcattgacagatagatcacacattatgaactttcaaggacttgtgttaactgacaattgcaaaaatcaatgggtcgttggaccattaataggaaaaggtggatttggtagtatttatactactaatgacaataattatgtagtaaaaatagagcccaaagctaacggatcattatttaccgaacaggcattttatactagagtacttaaaccatccgttatcgaagaatggaaaaaatctcacaatataaagcacgtaggtcttatcacgtgcaaggcatttggtctatacaaatccattaatgtggaatatcgattcttggtaattaatagattaggtgcagatctagatgcggtgatcagagccaataataatagactaccaaaaaggtcggtgatgttgatcggaatcgaaatcttaaataccatacaatttatgcacgagcaaggatattctcacggagatattaaagcgagtaatatagtcttagatcaaatagataagaataaattatatctagtggattacggattggtttctaaattcatgtctaatggcgaacatgttccatttataagaaatccaaataaaatggataacggtactctagaatttacacctatagattcgcataaaggatacgttgtatctagacgtggagatctagaaacacttggatattgtatgattagatggttgggaggtatcttaccatggactaagatatctgaaacaaagaattgtgcattagtaagtgccacaaaacagaaatatgttaacaatactgcgactttgttaatgaccagtttgcaatatgcacctagagaattgctgcaatatattaccatggtaaactctttgacatattttgaggaacccaattacgacaagtttcggcacatattaatgcagggtgtatattattaagtgtggtgtttggtcgataaaaattaaaaaataacttaatttattattgatctcgtgtgtacaaccgaaatcatggcgatgttttacgcacacgctctcggtgggtacgacgagaatcttcatgcctttcctggaatatcatcgactgttgccaatgatgtcaggaaatattctgttgtgtcagtttataataacaagtatgacattgtaaaagacaaatatatgtggtgttacagtcaggtgaacaagagatatattggagcactgctgcctatgtttgagtgcaatgaatatctacaaattggagatccgatccatgatcaagaaggaaatcaaatctctatcatcacatatcgccacaaaaactactatgctctaagcggaatcgggtacgagagtctagacttgtgtttggaaggagtagggattcatcatcacgtacttgaaacaggaaacgctgtatatggaaaagttcaacatgattattctactatcaaagagaaggccaaagaaatgagtacacttagtccaggacctatcatcgattaccacgtctggataggagattgtatctgtcaagttactgctgtggacgtacatggaaaggaaattatgagaatgagattcaaaaagggtgcggtgcttccgatcccaaatctggtaaaagttaaacttggggagaatgatacagaaaatctttcttctactatatcggcggcaccatcgaggtaaccacctctctggaagacagcgtgaataatgtactcatgaaacgtttggaaactatacgccatatgtggtctgttgtatatgatcattttgatattgtgaatggtaaagaatgctgttatgtgcatacgcatttgtctaatcaaaatcctataccgagtactgtaaaaacaaatttgtacatgaagactatgggatcatgcattccatggaagctctagagtatcttagcgaactgaaggaatcaggtggatggagtcccagaccagaaatgcaggaatttgaatatccagatggagtggaagacactgaatcaattgagagattggtagaggagttcttcaatagatcagaacttcaggctggtaattctattaattgttaaacatacatctgtttcagctaagcaactaagaacacgtatacggcagcagcttccttctatactctcatcttttaccaacacaaagggtggatatttgttcattggagttgataataatacacacaaagtatttggattcacggtgggttacgactacctcagactgatagagaatgatatagaaaagcatatcaaaagactttgtgttgtgtatttctgtgagaagaaagaggacatcaagtacgcgtgtcgattcatcaaggtatataaacctggggatgaggctacctcgacatacgtgtgcgctatcaaagtggaaagatgctgttgtgctgtgtttgcagattggccagaatcatggtatatggatactaatggtatcaagaagtattctccagatgaatgggtgtcacatataaaattttaattaatgtaactatagagaacaaataataaggttgtaatatcatatagacaataactaacaattaattagtaactgttatctcttttttaattaaccaactaactatatacctattaatacatcgtaattatagttcttaacatctattaatcattaattcgcttctttaattttttataaactaacattgttaattgaaaagggataacatgttacagaatataaattatatatggatttttttaaaaaggaaatacttgactggagtatatatttatctcttcattatatagcacgcgtgttttccaatttttccacatcccatataatacaggattataatctcgttcgaacatacgagaaagtggataaaacaatagttgattttttatctaggttgccaaatttattccatattttagaatatggggaaaatattctacatatttattctatggatgatgctaatacgaatattataattttttttctagatagagtattaaatattaataagaacgggtcatttatacacaatctcgggttatcatcatccattaatataaaagaatatgtatatcaattagttaataatgatcatccagataataggataagactaatgcttgaaaatggacgtagaacaagacattttttgtcctatatatcagatacagttaatatctatatatgtattttaataaatcatggattttatatagatgccgaagacagttacggttgtacattattacatagatgtatatatcactataagaaatcagaatcagaatcatacaatgaattaattaagatattgttaaataatggatcagatgtagataaaaaagatacgtacggaaacacaccttttatcctattatgtaaacacgatatcaacaacgtggaattgtttgagatatgtttagagaatgctaatatagactctgtagactttaatagatatacacctcttcattatgtctcatgtcgtaataaatatgattttgtaaagttattaatttctaaaggagcaaatgttaatgcgcgtaataaattcggaactactccattttattgtggaattatacacggtatctcgcttataaaactatatttggaatcagacacagagttagaaatagataatgaacatatagttcgtcatttaataatttttgatgctgttgaatctttagattatctattatccagaggagttattgatattaactatcgtactatatacaacgaaacatctatttacgacgctgtcagttataatgcgtataatacgttggtctatctattaaacaaaaatggtgattttgagacgattactactagtggatgtacatgtatttcggaagcagtcgcaaacaacaacaaaataataatggaagtactattgtctaaacgaccatctttgaaaattatgatacagtctatgatagcaattactaaacataaacagcataatgcagatttattgaaaatgtgtataaaatatactgcgtgtatgaccgattatgatactcttatagatgtacagtcgctacagcaatataaatggtatattttaagatgtttcgatgaaatagatatcatgaagagatgttatataaaaaataaaactgtattccaattagttttttgtatcaaagacattaatactttaatgagatacggtaaacatccttctttcgtgaaatgcactagtctcgacgtatacggaagtcgtgtacgtaatatcatagcatctattagatatcgtcagagattaattagtctattatccaagaagctggatcctggagataaatggtcgtgttttcctaacgaaataaaatataaaatattggaaaactttaacgataacgaactatccacatatctaaaaatcttataaacattattaaaatataaaatctaagtaggataaaatcacactacatcattgtttccttttagtgctcgacagtgtatactatttttaacgctcataaataaaaatgaaaacgatttccgttgttacgttgttatgcgtactacctgctgttgtttattcaacatgtactgtacccactatgaataacgctaaattaacgtctaccgaaacatcgtttaatgataaccagaaagttacgtttacatgtgatcagggatatcattctttggatccaaatgctgtctgtgaaacagataaatggaaatacgaaaatccatgcaaaaaaatgtgcacagtttctgattatgtctctgaactatataataaaccgctatacgaagtgaattccaccatgacactaagttgcaacggcgaaacaaaatattttcgttgcgaagaaaaaaatggaaatacttcttggaatgatactgttacgtgtcctaatgcggaatgtcaacctcttcaattagaacacggatcgtgtcaaccagttaaagaaaaatactcatttggggaatatatgactatcaactgtgatgttggatatgaggttattggtgcttcgtacataagttgtacagctaattcttggaatgttattccatcatgtcaacaaaaatgtgatatgccgtctctatctaacggattaatttccggatctacattttctatcggtggcgttatacatcttagttgtaaaagtggttttacactaacggggtctccatcatccacatgtatcgacggtaaatggaatcccatactcccaatatgtgtacgaactaacgaaaaatttgatccagtggatgatggtcccgacgatgagacagatttgagcaaactctcgaaagacgttgtacaatatgaacaagaaatagaatcgttagaagcaacttatcatataatcatagtggcgttgacaattatgggcgtcatatttttaatctccgttatagtattagtttgttcctgtgacaaaaataatgaccaatataagttccataaattgctaccgtaaatataaatccgttaaaataattaataatttaataacaaacaagtatcaaaagattaaagacttatagctagaatcaattgagatgtcttcttcagtggatgttgatatctacgatgccgttagagcatttttactcaggcactattataacaagagatttattgtgtatggaagaagtaacgccatattacataatatatacaggctatttacaagatgcgccgttataccgttcgatgatatagtacgtactatgccaaatgaatcacgtgttaaacaatgggtgatggatacacttaatggtataatgatgaatgaacgcgatgtttctgtaagcgttggcaccggaatactattcatggaaatgtttttcgattacaataaaaatagtatcaacaatcaactaatgtatgatataattaatagcgtatctataattctagctaatgagagatatagaagcgcttttaacgacgatggtatatacatccgtagaaatatgattaacaagttgtacggatacgcatctctaactactattggcacgatcgctggaggtgtttgttattatctgttgatgcatctagttagtttgtataaataattatttcaatatactagttaaaattttaagattttaaatgtataaaaaactaataacgtttttatttgtaataggtgcattagcatcctattcgaataatgagtacactccgtttaataaactgagtgtaaaactctatatagatggagtagataatatagaaaattcatatactgatgataataatgaattggtgttaaattttaaagagtacacaatttctattattacagagtcatgcgacgtcggatttgattccatagatatagatgttataaacgactataaaattattgatatgtataccattgactcgtctactattcaacgcagaggtcacacgtgtagaatatctaccaaattatcatgccattatgataagtacccttatattcacaaatatgatggtgatgagcgacaatattctattactgcagagggaaaatgctataaaggaataaaatatgaaataagtatgatcaacgatgatactctattgagaaaacatactcttaaaattggatctacttatatatttgatcgtcatggacatagtaatacatattattcaaaatatgatttttaaaaatttaaaatatattatcacttcagtgacagtagtcaaataacaaacaacaccatgagatatattataattctcgcagttttgttcattaatagtatacatgctaaaataactagttataagtttgaatccgtcaattttgattccaaaattgaatggactggggatggtctatacaatatatcccttaaaaattatggcatcaagacgtggcaaacaatgtatacaaatgtaccagaaggaacatacgacatatccgcatttccaaagaatgatttcgtatctttctgggttaaatttgaacaaggcgattataaagtggaagagtattgtacgggactatgcgtcgaagtaaaaattggaccaccgactgtaacattgactgaatacgacgaccatatcaatttgtacatcgagcatccgtatgctactagaggtagcaaaaagattcctatttacaaacgcggtgacatgtgtgatatctacttgttgtatacggctaacttcacattcggagattctaaagaaccagtaccatatgatatcgatgactacgattgcacgtctacaggttgcagcatagactttgtcacaacagaaaaagtgtgcgtgacagcacagggagccacagaagggtttctcgaaaaaattactccatggagttcgaaagtatgtctgacacctaaaaagagtgtatatacatgcgcaattagatccaaagaagatgttcccaatttcaaggacaaaatggccagagttatcaagagaaaatttaatacacagtctcaatcttatttaactaaatttctcggtagcacatcaaatgatgttaccacttttcttagcatgcttaacttgactaaatattcataactaatttttattaatgatacaaaaacgaaataaaactgcatattatacactggttaacgcccttataggctctaaccattttcaagatgaggtccctgattatagtccttctgttcccctctatcatctactccatgtctattagacgatgtgagaagactgaagaggaaacatggggattgaaaatagggttgtgtataattgccaaagatttctatcccgaaagaactgattgcagtgttcatctcccaactgcaagtgaaggattgataactgaaggcaatggattcagggatatacgaaacaccgataaattataaaaaaagcaatgtgtccgctgtttccgttaataatactattttcgtaactggcggattattcataaataactctaatagcacgatcgtggttaacaatatggaaaaacttgacatttataaagacaaacaatggtcgattatagaaatgcctatggctagggtatatcacggcattgactcgacatttggaatgttatattttgccggaggtctatccgttaccgaacaatatggtaatttagagaaaaacaacgagatatcttgttacaatcctagaacgaataagtggtttgatatttcatatactatttataagatatccatatcatcattgtgtaaactaaataacgtcttctatgtatttagtaaggacattggatatgtggaaaagtatgatggtgcatggaagttagtacatgatcgtctccccgctataaaggcattatcaacttctccttattgattgaaaatgaaaatataaatagtttttatgtatagcagtattaccctatagttttattgcttactactaacatggatacagatgttacaaatgtagaagatatcataaatgaaatagatagagagaaagaagaaatactaaaaaatgtagaaattgaaaataataaaaacattaacaagaatcatccaagtggatatattagagaagcactcgttattaataccagtagtaatagtgattccattgataaagaagttatagaatgtatcagtcacgatgtaggaatatagatcatatctactaatttttataatcgatacaaaacataaaaaacaactcgttattacatagcaggcatggaatccttcaagtattgttttgataacgatggcaagaaatggattatcggaaatactttatattctggtaattcaatactatataaggtcagaaaaaatttcactagttcgttctacaattacgtaatgaagatagatcacaaatcacacaagccattgttgtctgaaatacgattctatatatctgtattggatcctttgactatcgacaactggacacgggaacgtggtataaagtatttggctattccagatctgtatggaattggagaaaccgatgattatatgttcttcgttataaaaaattcgggaagagtattcgccccaaaggatactgaatcagtcttcgaagcatgcgtcactatgataaacacgttagagtttatacactctcgaggatttacccatggaaaaatagaaccgaggaatatactgattagaaataaacgtctttcactaattgactattctagaactaacaaactatacaagagtggaaactcacatatagattacaacgaggacatgataacttcaggaaatatcaattatatgtgtgtagacaatcatcttggagcaacagtttcaagacgaggagatttagaaatgttgggatattgcatgatagaatggttcggtggcaaacttccatggaaaaacgaaagtagtataaaagtaataaaacaaaaaaaagaatataaaaaatttatagctactttctttgaggactgttttcctgaaggaaatgaacctctggaattagttagatatatagaattagtatacacgttagattattctcaaactcctaattatgacagactacgtaaactgtttatacaagattgaaattatattcttttttttatagagtgtggtagtgttacggatatctaatattaatattagactatctctatcgcgctacacgaccaatatcgattactatggatatcttctatgaaaggagagaatgtatttatttctccagcgtcaatctcgtcagtattgacaatactgtattatggagctaatggatccactgctgaacagctatcaaaatatgtagaaacggaggagaacacggataaggttagcgctcagaatatctcattcaaatccatgaataaagtatatgggcgatattctgccgtgtttaaagattcctttttgagaaaaattggcgataagtttcaaactgttgacttcactgattgtcgcactatagatgcaatcaacaagtgtgtagatatctttactgaggggaaaatcaatccactattggatgaaccattgtctcctagcaattagtgccgtatactttaaagcaaaatggttgacgccattcgaaaaggaatttaccagtgattatcccttttacgtatctccgacggaaatggtagacgtaagtatgatgtctatgtacggcaaggcatttaatcacgcatctgtaaaagaatcattcggcaacttttcaatcatagaactgccatatgttggagatactagtatgatggtcattcttccagacaagattgatggattagaatccatagaacaaaatctaacagatacaaattttaagaaatggtgtgactttatggatgctatgtttatagatgttcacattcccaagtttaaggtaacaggctcgtataatctggtggatactctagtaaagtcaggactgacagaggtgttcggttcaactggagattatagcaatatgtgtaatttagatgtgagtgtcgacgctatgatccacaaaacgtatatagatgtcaatgaagagtatacagaagcagctgcagcaacttctgtactagtggcagactgtgcatcaacaattacaaatgagttctgtgcagatcatccgttcatctatgtgattaggcatgttgatggaaaaattcttttcgttggtagatattgctctccgacaactaattgttaaccattttttttaaaaaaaatagaaaaaacatgtggtattagtgcaggtcgttgttcttccaattgcaattggtaagatgacggccaactttagtacccacgtcttttcaccacagcactgtggatgtgacagactgaccagtattgatgacgtcaaacaatgtttgactgaatatatttattggtcgtcctatgcataccgcaacaggcaatgcgctggacaattgtattccacactcctctcttttagagatgatgcggaattagtgttcatcgacattcgcgagctggtaaaaaatatgccgtgggatgatgtcaaagattgtacagaaatcatccgttgttatataccggatgagcaaaaaaccatcagagagatttcggccatcatcggactttgtgcatatgctgctacttactggggaggtgaagaccatcccactagtaacagtctgaacgcattgtttgtgatgcttgagatgctaaattacgtggattataacatcatattccggcgtatgaattgatgagttgtacatcttgacattttcttctttcttccagaaacaaactttttttacccactataaaataaaatgagtatactacctgttatatttttttattcttcattcgttcagacttttaacgcgcctgaatgtatcgacaaagggcaatattttgcatcattcatggagttagaaaacgagccagtaatcttaccatgtccttaaataaatacgctatcatccggatataatatattagatattttatgggaaaaacgaggagcggataatggtagcaatatgctaattctgaacccgacacaatcagactctggtatttatatatgcattaccacgaacgaaacctactgtgacatgatgtcgttaaatttgacaatcgtgtctgtctcagaatcaaatatagattttatctcgtatccacaaatagtaaatgagagatctactggcgaaatggtatgtcccaatattaatgcatttattgctagtaacgtaaacgcagatattatatggagcggacatcgacgccttagaaataagagacttaaacaacggacacctggaattattaccatagaagatgttagaaaaaatgatgctggttattatacatgtgttttagaatatatatacggtggcaaaacatataacgtaaccagaattgtaaaattagaggtacgggataaaataataccttctactatgcaattaccagatggcattgtaacttcaataggtagtaatttgactattgcatgcagagtatcgttgagacctcccacaacggatgcagacgtcttttggataagtaatggtatgtattacgaagaagatgatggggacggaaacggtagaataagtgtagcaaataaaatctatatgaccgataagagacgtgttattacatcccggttaaacattaatcctgtcaaggaagaagatgctacaacgtttacgtgtatggcgtttactattcctagcatcagcaaaacagttactgttagtataacgtgaatgtatgttgttacatttccatgtcaattgagtttataagaatttttatacattatcttccaacaaacaattgacgaacgtattgctatgattaactcccacgatactatgcatattattaatcattaacttgcagactatacctagtgctattttgacatactcatgttcttgtgtaattgcggtatctatattattaaagtacgtaaatctagctatagttttattatttaattttagataatataccgtctccttatttttaaaaattgccacatcctttattaaatcatgaatgggaatttctatgtcatcgttagtatattgtgaacaacaagagcagatatctataggaaagggtggaatgcgatacattgatctatgtagttttaaaacacacgcgaactttgaagaatttatataaatcattccatcgatacatccttctatgttgagatgtatatatccaggaattcgtttattaatatcgggaaatgtataaactaaaacattgcccgaaagcggtgcctctatctgcgttatatccgttcttaacttacaaaatgtaaccaatacctttgcatgacttgttttgttcggcaacgttagtttaaacttgacgaatggattaattacaatagcatgatccgcgcatctattaagtttttttactttaacgcccttgtatgtttttacagagactttatctaaatttctagtgcttgtatgtgttataaatataacgggatatagaaccgaatcacctaccttagatacccaattacattttatcagatccagataataaacaaattttgtcgccctaactaattctatattgttatatattttacaattggttatgatatcatgtaataacttggagtctaacgcgcatcgtcgtacgtttatacaattgtgatttagtgtagtatatctacacatgtatttttccgcactatagtattctggactagtgataaaactatcgttatatctatcttcaatgaactcatcgagatattgctctctgtcatattcatacacctgcataaactttctagacatcttacaatccgtgttattttaggatcatatttacatatttacgggtatatcaaagatgttagattagttaatgggaatcgtctataataatgaatattaaacaattatatgaggacttttaccacaaagcatcataaaaatgagtcgtcgtctgatttatgttttaaatatcaaccgcaaatcaactcataaaatacaagagaatgaaatatatacatattttagtcattgcaatatagaccatacttctacagaacttgattttgtagttaaaaactatgatctaaacagacgacaacctgtaactgggtatactgcactacactgctatttgtataataattactttacaaacgatgtactgaagatattattaaatcatggagtggatgtaacgatgaaaaccagtagcggacgtatgcctgtttatatattgcttactagatgttgtaatatttcacatgatgtagtgatagatatgatagacaaagataaaaaccacttattacatagagactattccaacctattactagagtatataaaatctcgttacatgttattaaaggaagaggatatcgatgagaacatagtatccactttattagataagggaatcgatcctaactttaaacaagacggatatacagcgttacattattattatttgtgtctcgcacacgtttataaaccaggtgagtgtagaaaaccgataacgataaaaaaggccaagcgaattatttctttgtttatacaacatggagctaatctaaacgcgttagataattgtggtaatacaccattccatttgtatcttagtattgaaatgtgtaataatattcatatgactaaaatgctgttgacttttaatccgaatttcgaaatatgtaataatcatggattaacgcctatactatgttatataacttccgactacatacaacacgatattcttgttatgttaatacatcactatgaaacaaatgttggagaaatgccgatagatgagcgtcgtatgatcgtattcgagtttatcaaaacatattctacacgtccggcagattcgataacttatttgatgaataggtttaaaaatataaatatttatacccgctatgaaggaaagacattattacacgtagcatgtgaatataataatacacacgtaatagattatcttatacgtatcaacggagatataaatgcgttaaccgacaataacaaacacgctacacaactcattatagataacaaagaaaattccccatataccattaattgtttactgtatatacttagatatattgtagataagaatgtgataagatcgttggtggatcaacttccatctctacctatctttcgtcgcttatcatactagtcatatcctaaatgttgatcatattccaccaaatgattgtgaaagagattgagattaaatcgtctaacaaacaattagtttttatgacattaacatataataaataaattaatcattattgacttaacgatgacgaaagttatcatcatcttaggattcttaattattaatacaaattcattgtctatgaaatgtgaacaaggtgtctcatattataattcacaagaattaaagtgttgtaaactatgtaagccaggaacatattcagatcatcgatgtgataaatacagcgataccatttgtggacattgtccgagtgacacattcacgtcaatatataatcgttctccttggtgtcatagttgtagaggtccatgtggtactaatcgagtagaggtcacaccttgtacacctaccacaaatagaatctgtcattgtgactcgaatagttattgtctccttaaagcttctgatggtaactgtgttacatgtgctcctaaaacaaaatgtggtcgtgggtatggaaagaaaggagaagatgaaatgggtaataccatttgtaagaaatgtcggaagggtacttattcagatattgtatctgactctgatcaatgtaaaccaatgacaagataagacttactcgcatctactggatagacataaaatatcctcctcgtaataatgaaatataatatacactaattattaatatcaataacaatcgagtattaatatataggtcatttttaaatcccttttgggttccgtcccaaacggcgtttcggtctgcgtcgccgccatggccatgccgagcctctccgcgtgctcctccatcgaggacgacttcaactatggcagctcggtggcgtctgccagcgtgcacatacgaatggcatttctaagaaaagtctacggtatcctttgtctacaatttcttttaacaacggcaacaactgcagtatttttatactttgactgcatgcggacatttatacaagggagtcctgttctaatattggcatcaatgttcggatctataggcttgattttcgcattgactttacacagacataaacatcccctgaatctgtacctgctttgtggatttacactgtcggaatctctaacgctggcctctgttgttactttctatgatgtgcatgtcgttatgcaagctttcatgctgactactgcagcgtttcttgctctgactacatatactctacaatcaaagagagatttcagtaaacttggagcaggattgtttgctgctttgtggattttaattttgtcaggactcttggggatatttgtgcaaaatgagacagtgaagctggtcctgtctgcttttggggcccttgtattctgtggattcattatctatgacacgcactcactaatacataagctctcgcctgaagagtatgtgttagcctctatcaatctctacttggatatcatcaatctgttcttgcatctgttgcagcttttggaagtatctaataagaaataaagtttaaaatagaattaataaaaacatataggtcattttttaaacatggattggaaaccaaggtagttagttaatacacacaagatatatttttttcacatcatccacccatgggtaacaccaaggttgttagttaataatatacaagatattttttctcactctgatccatgtaaaccaaggacgagataagacactctcattcctcatctacaacccattaaaaaaatggaaattaaagccctctattagcatagacggctacaggtctaccttcacaatggcctttccttgtgccaagttcagtccctgtcattgccacgctactaaggactccctgaataccgtggccgacgtcagacattgtctgactgaatacatcctgtgggtttctcatagatggacccatagagaaactgcagggtctctctacaggcttctcatctctttcagaactgatgcaacggagctctttggtggtgagttgaaggattcacttccgtgggacaattgcgtggagatcattaaatgtttcatcagaaatgactccatgaaaaccgccgaagaacttcgtgcaatcattggactttgtactcaatcagctatcgtctctggaagagtcttcaacgataagtatatcgacatactacttatgctgcgaaagattctgaacgagaacgactatctcaccctcttggatcatatccgcactgctaaatactaaatctccactacactttttatcatcttatgaggaatgattgccttcgtgaaataggaataattagcaccagaatagctatggattattgtggtagagagtgcactattctatgtcgtctactggatgaagatgtgacgtacaaaaaaataaaactagaaattgaaacgtgtcacaacttatcaaaacatatagatagacgaggaaacaatgcgctacattgttacgtctccaataaatgcgatacagacattaagattgttctctcgcggagtcgagagactttgtagaaacaacgaaggattaactccgctaggagtatacagtaagcatagatacgtaaaatctcagattgtgcatctactgatatccagctattcaaattcctctaacgaactcaagtcgaatataaatgatttcgatctgtattcggataatatcgacttacgtctgctaaaatacctaattgtggataaacggatacgtccgtccaagaatacgaattatgcaatcaatggtctcggattggtggatatatacgtaacgagagaccagaagtattgctatggcttcttaaatcagaatgttacagcaccggttacgtatttcgtacctgtatgtacgacagtgatatgtgtaagaactctcttcattactatatatcgtctcatagagaatctcaatctctatccaaggatgtaattaaatgtttgatcgataacaatgtttccatccatggcagagacgaaggaggatctttacccatccaatactactggtctttctcaaccatagatatagagattgttaaattattattaataaaggatgtggacacgtgtagagtatacgacgtcagccctatattagaggcgtattatctaaacaagcgatttagagtaaccccatataatgtagacatggaaatcgttaatcttcttattgagagacgtcatactcttgtcgacgtaatgcgtagtattacttcgtacgattccagagaatataaccactacatcatcgataacattctaaagagatttagacaacaggatgtacaagccatgttgataaactacttacattacggcgatatggtcgttcgatgcatgttagataacggacaacaactatcctctgcacgactactttgttaataataatctcgtcgatgtaaacgtcgtaaggtttatcgtggaaaatatggacacgcggctgtaaatcacgtatcgaacaatggccgtctatgtatgtacggtctgatattatcgagatttaataattgcgggtatcactgttatgaaaccatactgatagatgtatttgatatactaagcaagtacatggatgatatagatatgatcgataactctactatattacgcggtcgatgtcaataatatacaatttgcaaagcggttattggaatatggagcgagtgtcacgctcgataatcaatacggccatccagaaaagcagttaccaaagagaaaacaaaacgaagctagttgatttattactgagttaccatcccactctagagactatgattgacgcatttaatagagatatacgctatctatatcctgaaccattattcgcctgtatcagatacgccttaatcctagatgatgattttccttctaaagtaaagtatgatatcgccggtcgtcataaggaactaaagcgctatagagtagacattaatagaatgaagaatgtctacatatcaggcgtctccatgtttgatatattatttaaacgaagcaaacgccacaaattgagatacgcaaagaatccgacatcaaatggtacaaaaaagaactaacgtccatcattacagaaactgtaaagaacaatgagaggatcgactccatagtggacaacattaatacagacgataacttgatttcgaaattacccatggagatactttattactccattaaataatttatcatggagcgataatgtcctgtttcatttgtttccatgacatattacaaaatcgattccgtccaagatgataaaaacatttaccggcatcataaacacggagtttattttatatgtctcgcataaacattactaaaaaaatatattgttcggttttctttcacatctttaattatgaaaaagtaaatcattatgagatggacgagattgtacgcatcgttcgcgacagtatgtggtacatacctaacgtatttatggacgacggtaagaatgaaggtcacgtttctgtcaacaatgtctgtcatatgtattttacgttctttgatgtggatacatcgtctcatctgtttaagctagttattaaacactgcgatctgaataaacgaggtaactctccattacattgctatacgatgaatacacgatttaatccatctgtattaaagatattgttacaccacggcatgcgtaactttgatagcaaggatgaccactatcaatcgataacaagatctttgatatactaacggacaccattgatgactttagtaaatcatccgatctattgctgtgttatcttagatataaattcaatgggagcttaaactattacgttctgtacaaaggatccgaccctaattgcgccgacgaggatgaactcacttctcttcattactactgtaaacacatatccacgttctacgaaagcaattattacaagttaagtcacactaagatgcgagccgagaagcgattcatctacgcgataatagattatggagcaaacattaacgcggttacacacttaccttcaacagtataccaaacatagtcctcgtgtggtgtatgctcttttatctcgaggagccgatacgaggatacgtaataatcttgattgtacacccatcatggaacgattgtgcaacaggtcatattctcataatgttactcaattggcacgaacaaaaggaagaaggacaacatctactttatctattcataaaacataatcaaggatacactctcaatatactacggtatctattagataggttcgacattcagaaagacgaatactataataccgcctttcaaaattgtaacaacaatgttgcctcatacatcggatacgacatcaaccttccgactaaagacggtattcgacttggtgtttgaaaacagaaacatcatatacaaggcggatgttgtgaatgacatcatccaccacagactgaaagtatctctacctatgattaaatcgttgttctacaagatgtctctccctacgacgattactacgtaaaaaagatactagcctactgcctattaagggacgagtcattcgcggaactacatagtaaattctgtttaaacgaggactataaaagtgtatttatgaaaaatatatcattcgataagatagattccatcatcgtgacataagtcgcctcaaagagattcgaatctccgacaccgacctgtatacggtatcacagctatcttaaagccatacattcagacagtcacatttcatttcccatgtacgacgatctcatagaacagtgccatctatcgatggagcgtaaaagtaaactcgtcgacaaagcactcaataaattagagtctaccatcggtcaatctagactatcgtatttgcctccggaaattatgcgcaatatcatctaaacagtatgttgtacggaaagaaccattacaaatattatccatgatagaaagaaaatatctatatgattggagaagtaggaaacaggaacaagacaacgattactacattattaaatcatgaagtccgtattatactcgtatatattgtttctctcatgtataataataaacggaagagatatagcaccgcatgcaccatccgatggaaagtgtaaagacaacgaatacaaacgccataatttgtgtccgggaacatacgcttccagattatgcgatagcaagactaacacacgatgtacgccgtgtggttcgggtaccttcacatctcgcaataatcatttacccgcttgtctaagttgtaacggaagacgcgatcgtgtaacacgactcacaatagaatctgtgaatgctctcccggatattattgtcttctcaaaggatcatccggatgcaaggcatgtgtttcccaaacaaaatgtggaataggatacggagtatccggagacgtcatctgttctccgtgtggtctcggaacatattctcacaccgtctcttccgcagataaatgcgaacccgtacccagtaatacgtttaactatatcgatgtggaaattaatctgtatcccgtcaacgacacgtcgtgtactcggacgaccactaccggtctcagcgaatccatctcaacgtcggaactaactattactatgaatcataaagactgtaatcccgtatttcgtgatggatacttctccgttcttaataaggtagcaacttcaggattctttacaggagaaaggtgtgcactctgaatttcgagattaaatgcaataacaaagattcttcctccaaacagttaacgaaagcaaagaatgatactatcatgccgcattcggagacagtaactctagtgggcgacatctatatactatatagtaataccaatactcaagactacgaaactgatacaatctcttatcatgtgggtaatgttctcgatgtcgatagccatatgcccggtagttgcgatatacataaactgatcactaattccaaacccacccactttttatagtaagtttttcacccataaataataaatacaataattaatttctcgtaaaagtagaaaatatattctaatttattgcgcggtaaggaagtagaatcataaagaacagtactcaatcaatagcaattatgaaacaatatatcgtcctggcatgcatgtgcctggcggcagctgctatgcctgccagtcttcagcaatcatcctcatcctcctcctcgtgtacggaagaagaaaacaaacatcatatgggaatcgatgttattatcaaagtcacaaagcaagaccaaacaccgaccaatgataagatttgccaatccgtaacggaaattacagagtccgagtcagatccagatcccgaggtggaatcagaagatgattccacatcagtcgaggatgtagatcctcctaccacttattactccatcatcggtggaggtctgagaatgaactttggattcaccaaatgtcctcagattaaatccatctcagaatccgctgatggaaacacagtgaatgctagattgtccagcgtgtccccaggacaaggtaaggactctcccgcgatcactcgtgaagaagctcttgctatgatcaaagactgtgaggtgtctatcgacatcagatgtagcgaagaagagaaagacagcgacatcaagacccatccagtactcgggtctaacatctctcataagaaagtgagttacgaagatatcatcggttcaacgatcgtcgatacaaaatgtgtcaagaatctagagtttagcgttcgtatcggagacatgtgcaaggaatcatctgaacttgaggtcaaggatggattcaagtatgtcgacggatcggcatctgaaggtgcaaccgatgatacttcactcatcgattcaacaaaactcaaagcgtgtgtctgaatcgataactctattcatctgaaattggatgagtagggttaatcgaacgattcaggcacaccacgaattaaaaaagtgtaccggacactatattccggtttgcaaaacaaaaatgttcttaactacattcacaaaaagttacctctcgcgacttcttctttttctgtctcaatagtgtgatacgattatgacactattcctattcctattcctattcctatttcctttcagggtatcacaaaaatattaaacctctttctgatggtctcataaaaaaagttttacaaaaatatttttattctctttctctctttgatggtctcataaaaaaagttttacaaaaatatttttattctctttctctctttgatggtctcataaaaaaagttttacaaaaatatttttattctctttctctctttgatggtctcataaaaaaagttttacaaaaatatttttattctctttctctctttgatggtctcataaaaaaagttttacaaaaatatttttattctctttctctctttgatggtctcataaaaaaagttttacaaaaatatttttattctctttctctctttgatggtctcataaaaaaagttttacaaaaatatttttattctctttctctctttgatggtctcataaaaaaagttttacaaaaatatttttattctctttctctctttgatggtctcataaaaaaagttttacaaaaatatttttattctctttctctctttgatggtctcataaaaaaagttttacaaaaatatttttattctctttctctctttgatggtctcataaaaaaagttttacaaaaatatttttattctctttctctctttgatggtctcataaaaaaagttttacaaaaatatttttattctctttctctctttgatggtctcataaaaaaagttttacaaaaatatttttattctctttctctctttgatggtctcataaaaaaagttttacaaaaat

SEQ ID NO: 8 - DNA, 188768 bp, Artificial Sequence
  LIVP 8.1.1
atcaaagagagaaagagaataaaaatatttttgtaaaacttttttatgagaccatcaaagagagaaagagaataaaaatatttttgtaaaactttttttatgagaccatcaaagagagaaagagaataaaaatatttttgtaaaactttttttatgagaccatcaaagagagaaagagaataaaaatatttttgtaaaactttttttatgagaccatcaaagagagaaagagaataaaaatatttttgtaaaactttttttatgagaccatcaaagagagaaagagaataaaaatatttttgtaaaactttttttatgagaccatcaaagagagaaagagaataaaaatatttttgtaaaactttttttatgagaccatcaaagagagaaagagaataaaaatatttttgtaaaactttttttatgagaccatcaaagagagaaagagaataaaaatatttttgtaaaactttttttatgagaccatcaaagagagaaagagaataaaaatatttttgtaaaactttttttatgagaccatcaaagagagaaagagaataaaaatatttttgtaaaactttttttatgagaccatcaaagagagaaagagaataaaaatatttttgtaaaactttttttatgagaccatcaaagagagaaagagaataaaaatatttttgtaaaactttttttatgagaccatcaaagagagaaagagaataaaaatatttttgtaaaactttttttatgagaccatcaaagagagaaagagaataaaaatatttttgtaaaactttttttatgagaccatcaaagagagaaagagaataaaaatatttttgtaaaactttttttatgagaccatcaaagagagaaagagaataaaaatatttttgtaaaactttttttatgagaccatcaaagagagaaagagaataaaaatatttttgtaaaactttttttatgagaccatcaaagagagaaagagaataaaaatatttttgtaaaactttttttatgagaccatcagaaagaggtttaatatttttgtgatactctgaaaggaaataggaataggaataggaatagtgtcataatcgtatcacactattgagacagaaaaagaagaagtcgcgagaggtaactttttgtgaatgtagttaagaacatttttgttttgcaaaccggaatatagtgtccggtacacttttttaattcgtggtgtgcctgaatcgttcgattaaccctactcatccaatttcagatgaatagagttatcgattcagacacacgctttgagttttgttgaatcgatgagtgaagtatcatcggttgcaccttcagatgccgatccgtcgacatacttgaatccatccttgacctcaagttcagatgattccttgcacatgtctccgatacgaacgctaaactctagattcttgacgcattttgtatcgacgatcgttgaaccgatgatatcttcgtaactcactttcttatgagagatgttagacccgagtactggatgggtcttgatgtcgctgtctttctcttcttcgctacatctgatgtcgatagacacttcacagtctttgatcatagcaagagcttcttcatgagtgatcgcgggagagtccttaccttgtcctggggacacgctggacaatctagcattcactgtgtttccatcagcggattctgagatggatttaatctgaggacatttggtgaatccaaagttcattctcagacctccaccgatgatggagtaataagtggtaggaggatctacatcctcgactgatgtggaatcatcttctgattccacctcgggatctggatctgactcggactctgtaatttccgttacggattggcaaatcttatcattggtcggtgtttggtcttgctttgtgactttgataataacatcgattcccatatgatgtttgttttcttcttccgtacacgaggaggaggatgaggatgattgctgaagactggcaggcatagcagctgccgccaggcacatgcatgccaggacgatatattgtttcataattgctattgattgagtactgttctttatgattctacttccttaccgtgcaataaattagaatatattttctacttttacgagaaattaattattgtatttattatttatgggtgaaaaacttactataaaaagtgggtgggtttggaattagtgatcagtttatgtatatcgcaactaccgggcatatggctatcgacatcgagaacattacccacatgataagagattgtatcagtttcgtagtcttgagtattggtattactatatagtatatagatgtcgcccactagagttactgtctccgaatgcggcatgatagtatcattctttgctttcgttaactgtttggaggaagaatctttgttattgcatttaatctcgaaattcagagtgcacacctttctcctgtaaagaaacctgaagtcgctaccttattaagaacggagaagtatccatcacgaaatacgggattacagtctttatgattcatagtaatagttagttccgacgttgagatggattcgctgagaccggtagtggtcgtccgagtacacgacgtgtcgttaactggatacaggttaatttccacatcgatatagttaaacgtatttctgggtacgggttcgcatttatctgcggaagagacggtgtgagaatatgttccgagaccacacggagaacagatgacgtctccggatactccgtatcctattccacattttgtttgggaaacacatgccttgcatccggatgatcctttgagaagacaataatatccgggagagcattcacagattctattgtgagtcgtgttacacgatcgcgtcttccgttacaacttagacaagcgggtaaatgattattgcgagatgtgaaggtacccgaaccacacggcgtacatcgtgtgttagtcttgctatcgcataatctggaagcgtatgttcccggacacaaattatggcgtttgtattcgttgtctttacactttccatcggatggtgcatgcggtgctatatctcttccgtttattattatacatgagagaaacaatatatacgagtataatacggacttcatgatttaataatgtagtaatcgttgtcttgttcctgtttcctacttctccaatcatatagatattttctttctatcatggataatatttgtaatggttctttccgtacaacatactgtttagatgatattgcgcataatttccggaggcaaatacgatagtctagattgaccgatggtagactctaatttattgagtgctttgtcgacgagtttacttttacgctccatcgatagatggcactgttctatgagatcgtcgtacatgggaaatgaaatgtgactgtctgaatgtatggctttaagatagctgtgataccgtatacaggtcggtgtcggagattcgaatctctttgaggcgacttatgtcacgatgatggaatctatcttatcgaatgatatatttttcataaatacacttttatagtcctcgtttaaacagaatttactatgtagttccgcgaatgactcgtcccttaataggcagtaggctagtatcttttttacgtagtaatcgtcgtagggagagacatcttgtagaacaacgatttaatcataggtagagatactttcagtctgtggtggatgatgtcattcacaacatccgccttgtatatgatgtttctgttttcaaacaccaagtcgaataccgtctttagtcggaaggttgatgtcgtatccgatgtatgaggcaacattgttgttacaattttgaaaggcggtattatagtattcgtctttctgaatgtcgaacctatctaatagataccgtagtatattgagagtgtatccttgattatgttttatgaatagataaagtagatgttgtccttcttccttttgttcgtgccaattgagtaacattatgagaatatgacctgttgcacaatcgttccatgatgggtgtacaatcaagattattacgtatcctcgagataaaagagcatacaccacacgaggactatgtttggtatactgttgaaggtaagtgtgtaaccgcgttaatgtttgctccataatctattatcgcgtagatgaatcgcttctcggctcgcatcttagtgtgacttaacttgtaataattgctttcgtagaacgtggatatgtgtttacagtagtaatgaagagaagtgagttcatcctcgtcggcgcaattagggtcggatcctttgtacagaacgtaatagtttaagctcccattgaatttatatctaagataacacagcaatagatcggatgatttactaaagtcatcaatggtgtccgttagtatatcaaagatcttgttatcgattgatagtggtcatccttgctatcaaagttacgcatgccgtggtgtaacaatatctttaatacagatggattaaatcgtgtattcatcgtatagcaatgtaatggagagttacctcgtttattcagatcgcagtgtttaataactagcttaaacagatgagacgatgtatccacatcaaagaacgtaaaatacatatgacagacattgttgacagaaacgtgaccttcattcttaccgtcgtccataaatacgttaggtatgtaccacatactgtcgcgaacgatgcgtacaatctcgtccatctcataatgatttactttttcataattaaagatgtgaaagaaaaccgaacaatatatttttttagtaatgtttatgcgagacatataaaataaactccgtgtttatgatgccggtaaatgtttttatcatcttggacggaatcgattttgtaatatgtcatggaaacaaatgaaacaggacattatcgctccatgataaattatttaatggagtaataaagtatctccatgggtaatttcgaaatcaagttatcgtctgtattaatgttgtccactatggagtcgatcctctcattgttctttacagtttctgtaatgatggacgttagttcttttttgtaccatttgatgtcggattctttgcgtatctcaatttgtggcgtttgcttcgtttaaataatatatcaaacatggagacgcctgatatgtagacattcttcattctattaatgtctactctatagcgctttagttccttatgacgaccggcgatatcatactttactttagaaggaaaatcatcatctaggattaaggcgtatctgatacaggcgaataatggttcaggatatagatagcgtatatctctattaaatgcgtcaatcatagtctctagagtgggatggtaactcagtaataaatcaactagcttcgttttgttttctctttggtaactgcttttctggatggccgtattgattatcgagcgtgacactcgctccatattccaataaccgctttgcaaattgtatattattgacatcgaccgcgtaatatagtagagttatcgatcatatctatatcatccatgtacttgcttagtatatcaaatacatctatcagtatggtttcataacagtgatacccgcaattattaaatctcgataatatcagaccgtacatacatagacggccattgttcgatacgtgatttacagccgcgtgtccatattttccacgataaaccttacgacgtttacatcgacgagattattattaacaaagtagtcgtgcagaggatagttgttgtccgttatctaacatgcatcgaacgaccatatcgccgtaatgtaagtagtttatcaacatggcttgtacatcctgttgtctaaatctctttagaatgttatcgatgatgtagtggttatattctctggaatcgtacgaagtaatactacgcattacgtcgacaagagtatgacgtctctcaataagaagattaacgatttccatgtctacattatatggggttactctaaatcgcttgtttagataatacgcctctaatatagggctgacgtcgtatactctacacgtgtccacatcctttattaataataatttaacaatctctatatctatggttgagaaagaccagtagtattggatgggtaaagatcctccttcgtctctgccatggatggaaacattgttatcgatcaaacatttaattacatccttggatagagattgagattctctatgagacgatatatagtaatgaagagagttcttacacatatcactgtcgtacatacaggtacgaaatacgtaaccggtgctgtaacattctgatttaagaagccatagcaatacttctggtctcggattaggcgtcgttacgtatatatccaccaatccgagaccattgattgcataattcgtattcttggacggacgtatccgtttatccacaattaggtattttagcagacgtaagtcgatattatccgaatacagatcgaaatcatttatattcgacttgagttcgttagaggaatttgaatagctggatatcagtagatgcacaatctgagattttacgtatctatgcttactgtatgctcctagcggagttaatccttcgttgtttctacaaagtctctcgactccgcgagagagtaacagccgaacaatcttaatgtctgtatcgcatttattgaagacgtaacaatgtagcgcattgtttcctcgtctatctatatgttttgataagttgtgacacgtttcaatctctggttttatttttttgtacgtcacatcttcatccagtagacgacatagaatagtgcactctctaccacaataatccatagctattctggtgctaattattcctatttcacgaaggcaatcattcctcataagatgataaaaagtgtagtggagatttagtatttagcagtgcggatatgatccaagagggtgagatagtcgttctcgttcagaatctttcgcagcataagtagtatgtcgatatacttatcgttgaagactctttataaaagtctatttgtttatatttattgcggatagcagtatttccctataaaaagtatacgtcctgtggtgtctttaatcatgtacatgaatggatggtttatgtagaccttcgtacgatataccatcgaaaagttaatcgtaaatactcctgtaacggccgatgcttctgtatactcctcattaacatctataaacgtcgtatgtagaaatttttctacagtgatagtttcattacacatcttgctaaaatctgcataatatccgaatatattagtaagtcctaaattttctaaaatcggtaccagattatacggttctgtcatttccactttaaactttggcatatacaagtctatacttttagtagataacataccacaccattttttaaatttttcatctgttatatttttttctatgttatatataccttctatgtcgtccggtagtataattaccatactagagtttccctcgtatggaatatcgataatagagaatcctccgaataattcattaatatgtacatattgcaagttattctcggtacccaccatcatatcaacgctggtaactatattcttagaaatataaaacttgtctgtatatgtaagatgtttagaaaatggatatttccacattgctttaaaatggacggcgctaacaactgtcatacgagtattaatggatagcggactagtcaataaggaattaattttaccatttgtcattgtcttaacccattcgttgattagttcctttgtttggttagcattattaaagtttacagtttgaaaatcgtcttttattttttgtaggaaggaggcgtggaactcgatactatcgctaccgtatattttatttgcggtagctagtgtcgcacaatacggaatatctacctccatgtcatcattattgtcatcgggtgtattctcattcatattctctatatattttgatagttgttcagctgtagaaccagctgctccatgatttagaatagataaagtagataaaatggaaactggagaaatcaaaacattttcatcagggtgttttaagattagttctttaaagatatccatggtatagacctaacgataacgatatatatcataaataaataatgttaaatttcaatttatgtttgtaccccgtattcatacttaacaaattggtattgcgtacacaatcaatcatattacataccattaataatgcaagcataaaaaattgttagtagatgtttctaaatataggttccgtaagcaaagaatataagaatgaagcggtaatgataaaatcaatcgttatctaaaatgatcatactcatttattttattctattatattaacacatacatttttaacagcaacacattcaatattgtattgttatttttatattatttacacaattaacaatatattattagtttatattactgaattaataatataaaattcccaatcttgtcataaacacagaatccatcaaaaatgttgataaattatctgatgttgttgttcgctgctatgataatcagatcattcgccgatagtggtaacgctatcgaaacgacattgccagaaattacaaacgctacaacagatattccagctatcagattatgcggtccagagggagatggatattgtttacacggtgactgtatccacgctagagatatcgacggtatgtattgtagatgctctcatggttatacaggcattagatgtcagcatgtagtattagtagactatcaacgttcagaaaacccaaacactacaacgtcatatatcccatctcccggtattatgcttgtattagtaggcattattatgtgttgtctattatctgtttataggttcactcgacgaactaaactacctatacaagatatggttgtgccataatttttataaatttttttatgagtatttttacaaaaatgtataaagtgtatgtcttatgtatatttataaaaatgctaagtatgcgatgtatctatgttatttgtatttatctaaacaatacctctacctctagatattatacaaaaattttttatttcggcatattaaagtaaaatctagttaccttgaaaatgaatacagtgggtggttccgtatcaccagtaagaacataatagtcaaatacagtatccgattgagattttgcatacaatactagtctagaaagaaatttgtaatcatcttctgtgacgggagtccatatatctgtatcatcgtctagtttatcagtgtcccatgctatattcctgttatcatcattagttaatgaaaataactctcgtgcttcagaaaagtcaaatattgtatccatacatacatctccaaaactatcgcttatacgtttatctttaacgatacctatacctagatggttatttactaacagacattttccagatctattgactataactcctatagtttccacatcaaccaagtaatgatcatctattgttatataacaataacataactcttttccatttttatcagtatgtatatctatatcaacgtcgtcgttgtagtgaatagtagtcattgatctattatatgaaacggatatgtctagaacggcaattgttttacgtccagttaacactttcgttgatttaaagtctagagtctttgcaaacataatatccttatccgactttatatttcctgtagggtggtataattttattttgcctccacatatcggtgtttccaaatatattactagacaatattccatatagttattagttaagggtacccaattagaacacgtacgcttattatcatcatttggatcgtatttcataaaagttattgtgttatcgatgtcaacacattctacattttttaatcgtctatatagtatttttctgatattttctataatatcagaattgtcttccatcggaagttgtatactatcggaatcagttacatgtttaaataattctctgatgtcattccttatacaatcaaattcattattaaacagtttaatagtctgtagacctttatcgtcgtaaatatccattgtcttattagttacgcttatttttatgtgtttttacgttgctttattatattttataagaatgattgtttgacgaatcacgagaactattaagacacattattaggtatatattataaaaaagtttttgattacgatgttataagaggaaagaggacacattaacatcatacatcaattaactacattcttataacatcgtaatcaaaagaattgcaattttgatgtataacaactgtcaatgggttatggaattgtatattacatattatacggtatgttggtaacgacaaataccggtcggtaattgtctgccggtgtaatagaattatatatatctatctattacaccggccttgtatacataataataagttgtggtagtatgatctccatatttataatttaggactttgtattcagtatttttggaatcataaaaaataaaaaaaagttttactaatttaaaatttaaaaagtatttacatttttttcactgtttagtcgcggatatggaattcgatcctgccaaaatcaatacatcatctatagatcatgtaacaatattacaatacatagatgaaccaaatgatataagactaacagtatgcattatccgaaatattatatcaatatcacaaaaataaatacacatttggctaatcaatttcgggcttggaaaaaacgtatcgccggaagggactatatgactaacttatctagagatacaggaatacaacaatcaaaacttactgaaactatacgtaactgtcaaaaaaatagaaacatatatggtctatatatacactacaatttagttattaattggataaccgatgtgattatcaatcaatattaagagggttggtaaattggtacatagctaataatacctatacacccaataatacaacaaccatttctgagttggatatcatcaaaatactaaataaatacgaggacgtgtatagagtaagtaaagaaaaagaatgtggaatttgctatgaagttgtttactcaaaacgatagatactttggtttattggattcgtgtactcatatattttgcataacatgcatcaatatatggcatagaacacgaagagaaaccggtgcgtcggataattgtcctatatgccgtacccgttttagaaacataacaatgagcaagttctataagctagttaactaataaataaaaagtttaatttgttgacgacgtatgtcgttattttttctcgtataaaagattaatttgattctaatataatctttagtattggataaatatcaattcaaattaattccattagattatatcataaataaaaatagtagcacgcactacttcagccaaatattcttttttgaaacgccatctatcgtagtgaggacacaagtgaacctataattatcaaatttattagtatcagtcacatgaaggactttacgtagagtgacgattccactatctgtggtacgaacggtttcatcttctttgatgccatcacccagatgttctataaacttggtatcctcgtccgatctcatatcctttgccaaccaatacatgtagctaaaattaggcataaatttcacacatcctgaacaatgaaattctccagaagatgttacaatgtctagatttggacatttggtttcaaccgcgttaacatatgagtgaacacacccatacatgaaagcgatgagaaataggattctcatcttgccaaaatatcactagaaaaaatttatttatcagttttaaaggtataaaaaatacttattgttgctcgaatattttgtatttgatggtatacggaagattagaaatgtaggtattatcatcaactgattctatggttttatgtattctatcatgtttcactattgcgttggaaataatatcatacgcttccacatatattttattttgttttaactcataatactcacgtaattctggattattggcatatctatgaataattttagctccatgatcagtaaatattaatgagaacatagtattaccacctaccattatttttttcatctcattcaattcttaattgcaaagatctatataatcattatagcgttgacttatggactctggaatcttagacgatgtacagtcatctataatcatggcatatttaatacattgttttatagcatagtcgttatctacgatgttagatatttctctcaatgaatcaatcacacaatctaatgtaggtttatgacataatagcattttcagcagttcaatgtttttagattcgttgatggcaatggctatacatgtatatccgttatttgatctaatgttgacatctgaaccggattctagcagtaaagatactagagattgtttattatatctaacagccttgtgaagaagtgtttctcctcgtttgtcaatcatgttaatgtctttaagataaggtaggcaaatgtttatagtactaagaattgggcaagcataagacatgtcacaaagacccttttttgtatgtataagtgtaaaaattataacatccatagttggatttacataggtgtccaatcgggatctctccatcatcgagataattgatggcatctcccttccttttttagtagatatttcatcgtgtaagaatcaatattaatatttctaaagtatccgtgtatagcctctttatttaccacagctccatattccactagagggatatcgccgaatgtcatatactcaattagtatatgttggaggacatccgagttcattgttttcaatatcaaagagatggtttccttatcatttctccatagtggtacaatactacacattattccgtgcggctttccattttccaaaaacaatttgaccaaatctaaatctacatctttattgtatctataatcactatttagataatcagccataattcctcgagtgcaacatgttagatcgtctatatatgaataagcagtgttatctattcctttcattaacaatttaacgatgtctatatctatatgagatgacttaatataatattgaagagctgtacaatagtttttatctataaaagacggcttgattccgtgattaattagacatttaacaacttccggacgcacatatgctctcgtatccgactctgaatacagatgagagatgatatacagatgcaatacggtaccgcaatttcgtagttgataatcatcatacgcgtatcagtactcgtcctcataaagaacactgcagccattttctatgaacaaatcaataattttagaaacaggatcattgtcattacataattttctataactgaacgatggttttcacatttaacactcaagtcaaatccatgttctaccaacacctttatcaagtcaacgtctacatttttggatttcatatagctgaatatattaaagttatttatgttgctaaatccagtggcttctagtagagccatcgctatatccttattaactttaacatgtctactatttgtgtattcttctaatggggtaagctgtctccaatttttgcgtaatggattagtgccactgtctagtagtagtttgacgacctcgacattattacaatgctcattaaaaaggtatgcgtgtaaagcattattcttgaattggttcctggtatcattaggatctctgtctttcaacatctgtttaagttcatcaagagccacctcctcattttccaaatagtcaaacattttgactgaatgagctactgtgaactctatacacccacacaactaatgtcattaaatatcatgtcaaaaacttgtacaattattaataaaaataatttagtgtttaaattttaccagttccagattttacacctccgttaatacctccattaaccccactggacgatcctcctccccacattccaccgccaccagatgtataagttttagatcctttattactaccatcatgtccatggataaagacactccacatgccgccactaccccctttagaagacatattaataagacttaaggacaagtttaacaataaaattaatcacgagtaccctactaccaacctacactattatatgattatagtttctatttttacagtaccttgactaaagtttctagtcacaagagcaatactaccaacctacactattatatgattatagtttctatttttataggaacgcgtacgagaaaatcaaatgtctaatttctaacggtagtgttgataaacgattgttatccgcggatacctcctctatcatgtcgtctattttcttactttgttctattaacttattagcattatatattatttgattataaaacttatattgcttattagcccaatctgtaaatatcggattattaacatatcgtttctttgtaggtttatttaacatgtacatcactgtaagcatgtccttaccatttattttaatttgacgcatatccgcaatttctttttcgcagtcggttataaattctatatatgatggatacatgctacatgtgtacttataatcgactaatatgaagtacttgatacatattttcagtaacgatttattattaccacctatgaataagtacctgtgatcgtctaggtaatcaactgttttcttaatacattcgatggttggtaatttactcagaataatttccaatatcttaatatataattctgctatttctgggatatatttatctgccagtataacacaaatagtaatacatgtaaacccatattttgttattatattaatgtctgcgccattatctattaaccattctactaggctgacactatgcgactcaatacaatgataaagtatactacatccatgtttatctattttgtttatatcatcaatatacggcttacaaagttttagtatcgataacacatccaactcacgcatagagaaggtagggaataatggcataatatttattaggttatcatcattgtcattatctacaactaagtttccattttttaaaatatactcgacaactttaggatctctattgccaaatttttgaaaatatttatttatatgcttaaatctatataatgtagctccttcatcaatcatacatttaataacattgatgtatactgtatgataagatacatattctaacaatagatcttgtatagaatctgtatatcttttaagaattgtggatattaggatattattacataaactattacacaattctaaaatataaaacgtatcacggtcgaataatagttgatcaactatataattatcgattttgtgatttttcttcctaaactgtttacgtaaatagttagatagaatattcattagttcatgaccactatagttactatcgaataacgcgtcaaatatttcccgtttaatatcgcatttgtcaagataataatagagtgtggtatgttcacgataagtataataacgcatctctttttcgtgtgaaattaaatagtttattacgtccaaagatgtagcataaccatcttgtgacctagtaataatataataatagagaactgttttacccattctatcatcataatcagtggtgtagtcgtaatcgtaatcgtctaattcatcatcccaattataatattcaccagcacgtctaatctgttctattttgatcttgtatccatactgtatgttgctacatgtaggtattcctttatccaataatagtttaaacacatctacattgggatttgatgttgtagcgtatttttctacaatattaataccatttttgatactatttatttctatacctttcgaaattagtaatttcaataagtctatattgatgttatcagaacatagatattcgaatatatcaaaatcattgatatttttatagtcgactgacgacaataacaaaatcacaacatcgtttttgatattattatttttcttggtaacgtatgcctttaatggagtttcaccatcatactcatataatggatttgcaccactttctatcaatgattgtgcactgctggcatcgatgttaaatgttttacaactatcatagagtatcttatcgttaaccatgattggttgttgatgctatcgcattttttggtttctttcatttcagttatgtatggatttagcacgtttgggaagcatgagctcatatgatttcagtactgtagtgtcagtactattagtttcgatcagatcaatgtctagatctatagaatcaaaacacgataggtcagaagataatgaatatctgtaggcttcttgttgtactgtaacttctcgttttgttagatggttgcatcgtgctttaacatcaatggtacaaattttatcctcgctttgtgtatcatattcgtccctactataaaattgtatattcagattatcatgagatgtgtatacgctaacggtatcaataaacggagcacaccatttagtcataaccgtaatccaaaaatttttaaagtatatcttaacgaaagaagttgtgtcattgtctacggtgtatggtactagatcctcataagtgtatatatctagagtaatgtttaatttattaaatggttgataatatggatcctcatgacaatttcctaagacgaaaataagacataaacacgcaataaatctaatcgaagacatggttactccttaaaaaaatacgaataatcaccttggctatttagtaagtgtcatttaacactatactcatattaatccatggactcataatctctatacgggattaacggatgttctatatacggggatgagtagttctcttctttaactttatactttttactaatcatatttagactgatgtatgggtaatagtgtttgaagagctcgttctcatcatcagaataaatcaatatctctgtttttttgttatacagatgtattacagcctcatatattacgtaatagaacgtgtcatctaccttattaactttcaccgcatagttgtttgcaaatacggttaatcctttgacctcgtcgatttccgaccaatctgggcgtataatgaatctaaactttaatttcttgtaatcattcgaaataatttttagtttgcatccgtagttatcccctttatgtaactgtaaatttctcaacgcgatatctccattaataatgatgtcgaattcgtgctgtatacccatactgaatggatgaacgaataccgacggcgttaatagtaatttactttttcatctttacatattgggtactagttttactatcataagtttataaattccacaagctactatggaataagccaaccatcttagtataccacacatgtcttaaagtttattaattaattacatgttgttttatatatatcgctacgaatttaaagagaaattagtttaggaaaaaaaattatctatctacatcatcacgtctctgtattctacgatagagtgctactttaagatgcgacagatctgtgtcatcaaatatatactccattaaaatgattattccggcagcgaacttgatattggatatatcacaacctttgttaatatctacgacaatagacagcagtcccatggttccataaacagtgagtttatctttctttgaagagatattttgtagagatcttataaaactgtcgaatgacatcgcatttatatctttagctaaatcgtatatgttaccatcgtaatatctaaccgcgtctatcttaaacgtttccatcgctttaaagacgtttccgatagatggtctcatttcatcagtcatactgagccaacaaatataatcgtgtataacatctttgatagaatcagactctaaagaaaacgaatcggctttattatacgcattcatgataaacttaatgaaaaatgtttttcgttgtttaagttggatgaatagtatgtcttaataattgttattatttcattaattaatatttagtaacgagtacactctataaaaacgagaatgacataactaatcataactagttatcaaagtgtctaggacgcgtaattttcatatggtatagatcctgtaagcattgtctgtattctggagctattttctctatcgcattagtgagttcagaatatgttataaatttaaatcgaataacgaacataactttagtaaagtcgtctatattaactcttttattttctagccatcgtaataccatgtttaagatagtatattctctagttactacgatctcatcgttgtctagaatatcacatactgaatctacatccaattttagaaattggtctgtgttacatatctcttctatattattgttgatgtattgtcgtagaaaactattacgtagaccattttctttataaaacgaatatatagtactccaattatctttaccgatatatttgcacacataatccattctctcaatcactacatctttaagattttcgttgttaagatatttggctaaactatataattctattagatcatcaacagaatcagtatatatttttctagatccaaagacgaactctttggcgtcctctataatattcccagaaaagatattttcgtgttttagtttatcgagatctgatctgttcatatacgccatgattgtacggtacgttatgataaccgcataaaataaaaatccattttcatttttaaccaatactattcataattgagattgatgtaatactttgttactttgaacgtaaagacagtacacggatccgtatctccaacaagcacgtagtaatcaaatttggtgttgttaaacttcgcaatattcatcaatttagatagaaacttatactcatcatctgttttaggaatccatgtattattaccactttccaacttatcattatcccaggctatgtttcgtccatcatcgttgcgcagagtgaataattcttttgtattcggtagttcaaatatatgatccatgcatagatcggcaaagctattgtagatgtgatttttcctaaatctaatataaaactcgtttactagcaaacactttcctgatttatcgaccaagacacatatggtttctaaatctatcaagtggtggggatccatagttatgacgcagtaacatatattattacattcttgactgtcgctaatatctaaatatttattgttatcgtattggattctgcatatagatggcttgtatgtcaaagatatagaacacataaccaatttatagtcgcgctttacattctcgaatctaaagttaagagatttagaaaacattatatcctcggatgatgttatcactgtttctggagtaggatatattaaagtctttacagatttcgtccgattcaaataaatcactaaataatatcccacattatcatctgttagagtagtatcattaaatctattatattttatgaaagatatatcactgctcacctctatatttcgtacatttttaaactgtttgtataatatctctctgatacaatcagatatatctattgtgtcggtagacgataccgttacatttgaattaatggtgttccattttacaacttttaacaagttgaccaattcatttctaatagtatcaaactctccatgattaaatattttaatagtatccattttatatcactacggacacaaagtagctgacataaaccattgtataatttttatgttttatgtttattagcgtacacattttggaagttccggcttccatgtatttcctggagagcaagtagatgatgaggaaccagatagtttatatccgtacttgcacttaaagtctacattgtcgttgtatgagtatgatcttttaaacccgctagacaagtatccgtttgatattgtaggatgtggacatttaacaatctgacacgtgggtggatcggaccattctcctcctgaacacaggacactagagttaccaatcaacgaatatccactattgcaactataagttacaacgctcccatcggtataaaaatcctcgtatccgttatgtcttccgttggatatagatggaggggattggcatttaacagattcacaaataggtgcctcgggattccataccatagatccagtagatcctaattcacaatacgatttagattcaccgatcaactgatatccgctattacaagagtacgttatactagagccaaagtctactccaccaatatcaagttggccattatcgatatctcgaggcgatgggcatctccgtttaatacattgattaaagagtgtccatccagtacctgtacatttagcatatataggtcccattttttgctttctgtatccaggtagacatagatattctatagtgtctcctatgttgtaattagcattagcatcagtctccacactattcttaaatttcatattaatgggtcgtgacggaatagtacagcatgatagaacgcatcctattcccaacaatgtcaggaacgtcacgctctccaccttcatatttatttatccgtaaaaatgttatcctggacatcgtacaaataataaaaagcccatatatgttcgctattgtagaaattgtttttcacagttgctcaaaaacgatggcagtgacttatgagttacgttacactttggagtctcatctttagtaaacatatcataatattcgatattacgagttgacatatcgaacaaattccaagtatttgattttggataatattcgtattttgcatctgctataattaagatataatcaccgcaagaacacacgaacatctttcctacatggttaaagtacatgtacaattctatccatttgtcttccttaactatatatttgtatagataattacgagtctcgtgagtaattccagtaattacatagatgtcgccgtcgtactctacagcataaactatactatgatgtctaggcatgggagacttttttatccaacgatttttagtgaaacattccacatcgtttaatactacatatttctcatacgtggtataaactccacccattacatatatatcatcgtttacgaataccgacgcgcctgaatatctaggagtaattaagtttggaagtcttatccatttcgaagtgccgtgtttcaaatattctgccacacccgttgaaatagaaaattctaatcctcctattacatataactttccatcgttaacacaagtactaacttctgattttaacgacgacatattagtaaccgttttccattttttcgttttaagatctacccgcgatacggaataaacatgtctattgttaatcatgccgccaataatgtatagacaattatgtaaaacatttgcattatagaattgtctatctgtattaccgactatcgtccaatattctgttctaggagagtaatgggttattgtggatatataatcagagtttttaatgactactatattatgttttataccatttcgtgtcactggctttgtagatttggatatagttaatcccaacaatgatatagcattgcgcatagtattagtcataaacttgggatgtaaaatgttgatgatatctacatcgtttggatttttatgtatccactttaataatatcatagctgtaacatcctcatgatttacgttaacgtcttcgtgggataagatagttgtcagttcatcctttgataattttccaaattctggatcggatgtcaccgcagtaatattgttgattatttctgacatcgacgcattatatagttttttaattccatatcttttagaaaagttaaacatccttatacaatttgtgaaattaatattatgaatcatagtttttacacatagatctactacaggcggaacatcaattattatggcagcaactagtatcatttctacattgtttatggtgatgtttatcttcttccagcgcatatagtctaatagcgattcaaacgcgtgatagtttataccattcaatataatcgcttcatcctttagatggtgatcctgaatgcgtttaaaaaaattatacggagacgccgtaataatttccttattcacttgtataatttccccattgatagaaaatatcacgctttccattcttaaagtactataagtaattatagtataatgtaaacgtttatatattcaatatttttataaaaatcattttgacattaattcctttttaaatttccgtctatcatctatagaaacgtattctatgaatttataaaatgcttttacgtgtcctatcgtaggcgatagaaccgctaaaaagcctatcgaatttctacaaaagaatctgttatatggtatagggagagtataaaacattaaatgtccgtacttattaaagtattcagtagccaatcctaactctttcgaatacttattaatggctcttgttctgtacgaatctatttttttgaacaacggacctagtggtatatcttgttctatgtatctaaaataatgtctgactagatccgttagtttaatatccgcagtcatcttgtctagaatggcaaatctaactgcgggtttaggctttagtttagtttctatatctacatctatgtctttatctaacaccaaaaatataatagctaatattttattacaatcatccggatattcttctacgatctcactaactaatgtttctttggttatactagtatagtcactatcggacaaataaagaaaatcagatgatcgatgaataatacatttaaattcatcatctgtaagatttttgagatgtctcattagaatattattagggttagtactcattatcattcggcagctattacttattttattatttttcaccatatagatcaatcattagatcatcaaaatatgtttcaatcatcctaaagagtatggtaaatgactcttcccatctaatttctgaacgttcaccaatgtctctagccactttggcactaatagcgatcattcgcttagcgtcttctatattattaactggttgattcaatctatctagcaatggaccgtcggacagcgtcattctcatgttcttaatcaatgtacatacatcgccgtcatctaccaattcatccaacaacataagctttttaaaatcatcattataataggtttgatcgttgtcatttctccaaagaatatatctaataagtagagtcctcatgcttagttaacaactattttttatgttaaatcaattagtacaccgctatgtttaatacttattcatattttagtttttaggattgagaatcaatacaaaaattaatgcatcattaattttagaaatacttagtttccacgtagtcaatgaaacatttgaactcatcgtacaggacgttctcgtacaggacgtaactataaaccggtttatatttgttcaagatagatacaaatccgataactttttttacgaattctacgggatccactttaaaagtgtcataccgggttctttttatttttttaaacagatcaatggtgtgatgttgattaggtcttttacgaatttgatatagaatagcgtttacatattctccataatggtcaatcgccatttgttcgtatgtcataaattctttaattatatgacactgtgtattgtttagttcatccttgttcattgttaggaatctatccaaaatggcaattatactagaactataggtgcgttgtatacacatattgatgtgtctgtttatacaatcaatgctactaccttcgggtaaaattgtagcatcatataccatttctagtactttaggttcattattatccattgcagaggacgtcatgatcgaatcataaaaaaatatattatttttatgttattttgttaaaaataatcatcgaatacttcgtaagatactccttcatgaacataatcagttacaaaacgtttatatgaagtaaagtatctacgatttttacaaaagtccggatgcataagtacaaagtacgcgataaacggaataataatagatttatctagtctatctttttctatagctttcatagttagatacatggtctcagaagtaggattatgtaacatcagcttcgataaaatgactgggttatttagtcttacacattcgctcatacatgtatgaccgttaactacagagtctacactaaaatgattgaacaatagatagtctaccattgtttcgtattcagatagtacagcgtagtacatggcatcttcacaaattatatcattgtctaatagatatttgacgcatcttatggatcccacttcaacagccatcttaaaatcggtagaatcatattgctttcctttatcattaataatttctagaacatcatctctatcataaaagatacaaatattaactgtttgatccgtaataacattgctagtcgatagcaatttgttaataagatgcgctgggctcaatgtcttaataagaagtgtaagaggactatctccgaatttgttttgtttattaacatccgttgatggaagtaaaagatctataatgtctacattcttgactgttttagagcatacaatatggagaggtgtatttccatcatgatctggttttgagggactaattcctagtttcatcatccatgagattgtagaagcttttggattgtctgacataagatgtctatgaatatgatttttgccaaatttatccactatcctggcttcgaatccgatggacattatttttttaaacactctttctgaaggatctgtacacgccaacaacggaccacatccttcttcatcaaccgagttgttaatcttggctccatactgtaccaataaatttattctctctatgacttcatcatctgttcccgagagataatatagaggcgttttatgctgtttatcacacgcgtttggatctgcgccgtgcgtcagcagcatcgcgactattctattattattaattttagaagctatatgcaatggataatttccatcatcatccgtctcatttggagagtatcctctatgaagaagttcttcgacaaatcgttcatctagtcctttaattccacaatacgcatgtagaatgtgataattatttccagaaggttcgatagcttgtagcatattcctaaatacatctaaatttttactattatatttggcataaagagatagataatactcggccgacataatgttgtccattgtagtataaaaattaatatttctatttctgtatatttgcaacaatttactctctataacaaatatcataacttagttcttttatgtcaagaaggcactggtttagttcatctataaatgtcacgccataactaccacgcatgccatactcagaattatgataaagatatttatccttggggtgtaggtaatggggattaatctttgttggatcagtctctaagttaacacatgtcacacatgatccatttatagttatatcacacgatgatgatttatgaattgattccggaagatcgctatcgtattttgtggttccacaattcatttccatacatgttattgtcacactaatattatgatgaactttatctagccgctgagtggtaaacaacagaacagatagtttattatctttaccaacaccctcagccgctgccacaaatctctgatccgtatccatgatggtcatgtttatttctagtccgtatccagtcaacactatgttagcatttctgtcgatatagctttcactcatatgacactcaccaataatagtagaattaatgtcgtaatttacaccaatagtgagttcggcggcaaagtaccaataccggtaatcttgtcgaggaggacatatagtattcttgtattctaccgaatacccgagagatgcgatacaaaagagcaagactaatttgtaaaccatcttactcaaaatatgtaacaatagtacgatgcaatgagtaagacaataggaaatctatcttatatacacataattattctatcaattttaccaattagttagtgtaatgttaacaaaaatgtgggagaatctaattagtttttctttacacaattgacgtacatgagtctgagttccttgtttttgctaattatttcatccaatttattattcttgacgatatcgagatcttttgtataggagtcaaacttgtattcaacatgcttttctataatcattttagctatttcggcatcatccaatagtacattttccagattagcagaatagatattaatgtcgtatttgaacagagcctgtaacatctcaatgtctttattatctatagccaatttaatgtccggaatgaagagaagggaattattggtgtttgtcgacgtcatatagtcgagcaagagaatcatcatatccacgtgtccattttttatagtgatgtgaatacaactaaggagaatagccagatcaaaagtagatggtatctctgaaagaaagtaggaaacaatacttacatcattaagcatgacggcatgataaaatgaagttttccatccagttttcccatagaacatcagtctccaatttttcttaacaaacagttttaccgtttgcatgttaccactatcaaccgcataatacaatgcggtgtttcccttgtcatcaaattgtgaatcatccagtccactgaatagcaaaatctttactattttggtatcttccaatgtggctgcctgatgtaatggaaattcattctctagaagatttttcaatgctccagcgttcaacaacgtacatactagacgcacgttattatcagctattgcataatacaaggcactatgtccatggacatccgccttaaatgtatctttactagagagaaagcttttcagctgcttagacttccaagtattaattcgtgacagatccatgtctgaaacgagacgctaattagtgtatattttttcattttttataattttgtcatattgcaccagaattaataatatctttaatagatctgattagtagatacatggctatcgcaaaacaacatatacacatttaataaaaataatatttattaagaaaattcagatttcacgtacccatcaatataaataaaataatgattccttacaccgtacccatattaaggagattccaccttacccataaacaatataaatccagtaatatcatgtctgatgatgaacacaaatggtgtattaaattccagtttttcaggagatgatctcgccgtagctaccataatagtagatgcctctgctacagttccttgttcgtcgacatctatctttgcattctgaaacattttataaatatataatgggtccctagtcatatgtttaaacgacgcattatctggattaaacatactaggagccatcatttcggctatcgacttaatatccctcttattttcgatagaaaatttagggagtttaagattgtacactttattccctaattgagacgaccaatagtctaattttgcagccgtgatagaatctgtgaaatgggtcatattatcacctattgccaggtacatactaatattagcatccttatacggaaggcgtaccatgtcatattctttgtcatcgattgtgattgtatttccttgcaatttagtaactacgttcatcatgggaaccgttttcgtaccgtacttattagtaaaactagcattgcgtgttttagtgatatcaaacggatattgccatatacctttaaaatatatagtattaatgattgcccatagagtattattgtcgagcatattagaatctactacattagacataccggatctacgttctactatagaattaattttattaaccgcatctcgtctaaagtttaatctatataggccgaatctatgatattgttgataatacgacggtttaatgcacacagtattatctacgaaactttgataagttagatcagtgtacgtatatttagatgttttcagcttagctaatcctgatattaattctgtaaatgctggacccagatctctttttctcaaatccatagtcttcaataattctattctagtattacctgatgcaggcaatagcgacataaacatagaaaacgaataaccaaacggtgagaagacaatattatcatcttgaatatttttatacgctactataccggcattggtaaatccttgtagacgataggcggacgctgaacacgctaacgatagtatcaataacgcaatcatgattttatggtattaataattaaccttatttttatgttcggtataaaaaaattattgatgtctacacatccttttgtaattgacatctatatatccttttgtataatcaactctaatcactttaacttttacagttttccctaccagtttatccctatattcaacatatctatccatatgcatcttaacactctctgccaagatagcttcagagtgaggatagtcaaaaagataaatatatagagcataatcattctcgtatactctgccctttattacatcacccgcattgggcaacgaataacaaaatgcaagcatcttgttaacgggctcgtaaattgggataaaaattatgtttttattgtcttatatctattttattcaagagaatattcaggaatttctttttccggttgtatctcgtcgcagtatatatcatttgtacattgtttcatattttttaatagtttacaccttttagtaggactagtatcgtacaattcatagctgtattttgaattccaatcacgcataaaaatatcttccaattgttgacgaagacctaatccatcatccggtgtaatattaatagatgctccacatgtatccgtaaagtaatttcctgtccaatttgaggtacctatataggccgttttatcggttaccatatatttggcatggtttaccctagaatacggaatgggaggatcagcatctggtacaataaatagctttacttctatatttatgtttttagattttagcatagcgatagatcttaaaaagtttctcatgataaacgaagatcgttgccagcaactaatcaatagcttaacggatacttgtctgtctatagcggatcttcttaattcatcttctatataaggccaaaacaaaattttacccgccttcgaataaataatagggataaagttcataacagatacataaacgaatttactcgcatttctaatacatgacaataaagcggttaaatcattggttctttccatagtacatagttgttgcggtgcagaagcaataaatacagagtgtggaacgccgcttacgttaatactaagaggatgatctgtattataatacgacggataaaagtttttccaattatatggtagattgttaactccaagataccagtatacctcaaaaatttgagtgagatccgctgccaagttcctattattgaagatcgcaatacccaattccttgacctgagttagtgatctccaatccatgttagcgcttcctaaataaatatgtgtattatcagatatccaaaattttgtatgaagaactcctcctaggatatttgtaatatctatgtatcgtacttcaactccggccatttgtagtctttcaacatcctttaatggtttgttagatttattaacggctactctaactcgtactcctcttttgggtaattgtacaatctcgtttaatattatcgtgccgaaattcgtacccacttcatccgataaactccaataaaaagatgatatatctagtgtttttgtggtattggatagaatttccctccacatgttaaatgtagacaaatatactttatcaaattgcatacctataggaatagtttctgtaatcactgcgattgtattatccggattcattttatttgttaaaagaataatcctatatcacttcactctattaaaaatccaagtttctatttctttcatgactgattttttaacttcatccgtttccttatgaagatgatgtttggcaccttcataaatttttatttctctattacaatttgcatgttgcatgaaataatatgcacctaaaacatcgctaatcttattgtttgttccctggagtatgagagtcgggggggtgttaatcttggaaattatttttctaaccttgttggtagccttcaagacctgactagcaaatccagccttaattttttcatgattgactaatgggtcgtattggtatttataaactttatccatatctctagatactgattctggacatagctttccgactggcgcatttggtgtgatggttcccataagtttggcagctagcagattcagtcttgaaacagcatctgcattaactagaggagacattagaatcattgctgtaaacaagtttggattatcgtaagaggctagctcccatggaatgacccaataagtagatttaatagttaccacgtgctgtaccaaagtcatcaatcatcattttttcaccattacttcttccatgtccaatatgatcatgtgagaatactaaaattcctaacgatgatatgttttcagctagttcgtcataacgtccagaatgtttaccagctccatgacttatgaatactaatgccttaggatatgtaataggtttccaatatttacaatatatgtaatcattgtccagattgaacatacagtttgcactcatgattcacgttatataactatcaatattaacagttcgtttgatgatcatattatttttatgttttattgataattgtaaaaacatacaattaaatcaatatagaggaaggagacggctactgtcttttgtgagatagtcatggcgactaaattagattatgaggatgctgttttttactttgtggatgatgataaaatatgtagtcgcgactccatcatcgatctaatagatgaatatattacgtggagaaatcatgttatagtgtttaacaaagatattaccagttgtggaagactgtacaaggaattgatgaagttcgatgatgtcgctatacggtactatggtattgataaaattaatgagattgtcgaagctatgagcgaaggagaccactacatcaattttacaaaagtccatgatcaggaaagtttattcgctaccataggaatatgtgctaaaatcactgaacattggggatacaaaaagatttcagaatctagattccaatcattgggaaacattacagatttgatgaccgacgataatataaacatcttgatactttttctagaaaaaaaattgaattgatgatataggggtcttcataacgcataattattacgttagcattctatatccgtgttaaaaaaaattatcctatcatgtatttgagagttttatatgtagcaaacatgatagctgtgatgccaataagctttagatattcacgcgtgctagtgttagggatggtattatctggtggtgaaatgtccgttatataatctacaaaacaatcatcgcatatagtatgcgatagtagagtaaacatttttatagtttttactggattcatacatcgtctacccaattcggttataaatgaaattgtcgccaatcttacacccaaccccttgttatccattagcatagtattaacttcgttatttatgtcataaactgtaaatgattttgtagatgccatatcatacatgatattcatgtccctattataatcattactaactttatcacaatatatgttgataatatctatatatgatctagtctttgtgggcaactgtctatacaagtcgtctaaacgttgtttactcatatagtatcgaacagccatcattacatggtcccgttccgttgatagataatcgagtatgttagtggacttgtcaaatctatataccatattttctggaagtggatatacatagtcgtgatcaacattattgctagcctcatcttctatatcctgtactataccattatctatatcatctacataatctatgatattattacacataaacatcgacaacatactattgtttattatctaagtcctgttgatccaaacccttgatctcctctatttgtactatctagagattgtacttcttccagttctggataatatatacgttgatagattagctgagctattctatctccagtatttacattaaacgtacattttccattattaataagaatgactcctatgtttcccctataatcttcgtctattacaccacctcctatatcaatgccttttagtgacagaccagacctaggagctattctaccatagcaaatcttaggcatggacatactaatatctgtcttaattaactgtctttctcctggagggatagtataatcgtaagcgctatacaaatcatatccggcagcacccggcgattgcctagtaggagatttagctctgttagtttccttaacaaatctaactggtgagttaatattcatgttgaacataaaactaatattttatttcaaaattatttaccatcccatatattccatgaataagtgtgatgattgtacacttctatagtatctatatacgattcacgataaaatcctcctatcaatagcagtttattatccactatgatcaattctggattatccctcggataaataggatcatctatcagagtccatgtattgctggattcacaataaaattccgcatttctaccaaccaagaataaccttctaccgaacactaacgcgcatgatttataatgaggataataagtggatggtccaaactgccactgatcatgattgggtagcaaatattctgtagttgtatcagtttcagaatgtcctcccattacgtatataacattgtttatggatgccactgctggattacatctaggtttcagaagactcggcatattaacccaagcagcatccccgtggaaccaacgctcaacagatgtgggatttggtagacctcctactacgtataatttattgttagcgggtatcccgctagcatacagtctggggctattcatcggaggaattggaatccaattgtttgatatataatttaccgctatagcattgttatgtatttcattgttcatccatccaccgatgagatatactacttctccaacatgagtacttgtacacatatggaatatatctataatttgatccatgttcataggatactctatgaatggatacttgtatgatttgcgtggttgtttatcacaatgaaatattttggtacagtctagtatccattttacattatttatacctctgggagaaagataatttgacctgattacatttttgataaggagtagcagatttcctaatttatttcttcgctttatataccacttaatgacaaaatcaactacataatcctcatctggaacatttagttcatcgctttctagaataagtttcatagatagataatcaaaattgtctatgatgtcatcttccagttccaaaaagtgtttggcaataaagtttttagtatgacataagagattggatagtccgtattctatacccatcatgtaacactcgacacaatattcctttctaaaatctcgtaagataaagtttatacaagtgtagatgataaattctacagaggttaatatagaagcacgtaataaattgacgacgttatgactatctatatatacctttccagtatacgagtaaataactatagaagttaaactgtgaatgtcaaggtctagacaaaccctcgtaactggatctttatttttcgtgtatttttgacgtaaatgtgtgcgaaagtaaggagataactttttcaatatcgtagaattgactattatattgcctcctatggcatcaataattgttttgaatttcttagtcatagacaatgctaatatattcttacagtacacagtattgacaaatatcggcatttatgtttctttaaaagtcaacatctagagaaaaatgattatctttttgagacataactcccattttttggtattcacccacacgtttttcgaaaaaattagtttttccttccaatgatatattttccatgaaatcaaacggattggtaacattataaatttttttaaatcccaattcagaaatcaatctatccgcgacgaattctatatatgttttcatcatttcacaattcattcctataagtttaactggaagagccgcagtaagaaattcttgttcaatggatactgcatctgttataatagatctaacggtttcttcactcggtggatgcaataaatgtttaaacatcaaacatgcgaaatcgcagtgcagaccctcgtctctactaattagttcgttggaaaacgtgagtccgggcattaggccacgctttttaagccaaaatatggaagcgaatgatccggaaaagaagattccttctactgcagcaaaggcaataagtctctctccataaccggcgctgtcatgtatccacttttgagcccaatcggccttcttttttacacaaggcatcgtttctatggcattaaagagatagtttttttcattactatctttaacataagtatcgatcaaaagactatacatttccgaatgaatgttttcaatggccatctgaaatccgtagaaacatctagcctcggtaatctgtacttctgtacaaaatcgttccgccaaattttcattcactattccgtcactggctgcaaaaaacgccaatacatgttttataaaatatttttcgtctggtgttagtttattccaatcattgatatctttagatatatctacttcttccactgtccaaaatgatgcctctgcctttttatacatgttccagatgtcataatattggattgggaaaataacaaatctatttggatttggtgcaaggatgggttccataactaaattaacaatatcaataaattttttttcagttatctatatgcctgtacttggattttttgtacatcgatatcgccgcaatcactacaataattacaagtattattgatagcattgttattagtactatcataattaaattatctacattcatgggtgctgaataatcgttattatcatcattatcattttgtaattgtgacatcatactagataaatcgtttgcgagattgttgtgggaagcgggcatggaggatgcattatcattattatttaacgccttccatttggattcacaaatgttacgcacattcaacattttatggaaactataattttgtgaaaacaaataacaagaaaactcgtcatcgttcaaatttttaacgatagtaaaccgattaaacgtcgagctaatttctaacgctagcgactctgttggatatgggtttccagatatatatcttttcagttcccctacgtatctataatcatctgtaggaaatggaagatatttccatttatctactgttcctaatatcatatgtggtggtgtagtagaaccattaagcgcgaaagatgttatttcgcatcgtattttaacttcgcaataatttctggttagataacgcactctaccagtcaagtcaatgatattagcctttacagatatattcatagtagtcgtaacgatgactccatcttttagatgcgatactcctttgtatgtaccagaatcttcgtacctcaaactcgatatatttaaacaagttaatgagatattaacgcgttttatgaatgatgatatataaccagaagttttatcctcggtggctagcgctataaccttatcattataataccaactagtgtgattaatatgtgacacgtcagtgtgggtacaaatatgtacattatcgtctacgtcgtattcgatacatccgcatacagccaacaaatataaaatgacaaatactctaacgccgttcgtacccatcttgatgcggtttaataaatgttttgatttcaatttattgtaaaaaaagattcggttttatactgttcgatattctcattgcttatattttcatctatcatctccacacagtcaaatccgtggttagcatgcacctcatcaaccggtaaaagactatcggactcttctatcattataactctagaatatttaatttggtcattattaatcaagtcaattatcttatttttaacaaacgtgagtattttactcattttttataaaaacttttagaaatatacagactctatcgtgtgtctatatcttctttttatatccaatgtatttatgtctgatttttcttcatttatcatatataatggtccaaattctacacgtgcttcggattcatccagatcattaaggttcttataattgtaacatccttctcttccctcttctacatcttccttcttattcttattcttagcgtcacagaatctaccacagcaggatcccatgacgagcgtcatattaaactaatccattttcaattataatatatgattagtaatgaccattaaaataaaaaatattcttcataaccggcaagaaagtgaaaagttcacattgaaactatgtcagtagtatacatcatgaaatgatgatatatatatactctattttggtggaggattatatgatataattcgtggataatcatttttaagacacatttctttattcgtaaatcttttcacgttaaatgagtgtccatattttgcaatttcttcatatgatggcggtgtacgtggacgaggctgctcctgttcttgttgtggtcgccgactgtcgtgtctgcgtttagatccctccattatcgcgattgcgtagatggagtactattttataccttgtaattaaatttttttattaattaaacgtataaaaacgttccgtatctgtatttaagagccagatttcgtctaatagaacaaatagctacagtaaaaataactagaataattgctacacccactagaaaccacggatcgtaatacggcaatcggttttcgataataggtggaacgtatattttatttaaggacttaacaattgtctgtaaaccacaatttgcttccgcggatcctgtattaactatctgtaaaagcatatgttgaccgggcggagccgaacattctccgatatctaatttctgtatatctataatattattaacctccgcatacgcattacagttcttttctagcttggataccgcactaggtacatcgtctagatctattcctatttcctcagcgatagctcttctatccttttccggaagcaatgaaatcacttcaataaatgattcaaccatgagtgtgaaactaagtcgagaattactcatgcatttgttagttattcggagcgcgcaatttttaaactgtcctataacctctcctatatgaatagcacaagtgacattagtagggatagaatgttgagctaatttttgtaaataactatctataaaaagattatacaaagttttaaactctttagtttccgccatttatccagtctgagaaaatgtctctcataataaatttttccaagaaactaattgggtgaagaatggaaacctttaatctatatttatcacagtctgttttggtacacatgatgaattcttccaatgccgtactaaattcgatatctttttcgatttctggatatgtttttaataaagtatgaacaaagaaatggaaatcgtaataccagttatgtttaactttgaaattgttttttattttcttgttaatgattccagccacttgggaaaagtcaaagtcgtttaatgccgatttaatacgttcattaaaaacaaactttttatcctttagatgaattattattggttcattggaatcaaaaagtaagatattatcgggtttaagatctgcgtgtaaaaagttgtcgcaacagggtagttcgtagattttaatgtataacagagccatctgtaaaaagataaactttatgtattgtaccaaagatttaaatcctaatttgatagctaactcggtatctactttatctgccgaatacagtgctaggggaaaaattataatgtttcctctttcatattcgtagttagttctcttttcatgttcgaaaaagtgaaacatgcggttaaaatagtttataacattaatattactgttaataactgccggataaaagtgggatagtaatttcacgaatttgatactgtcctttctctcgttaaacgcctttaaaaaaactttagaagaatatctcaatgagagttcctgaccatccatagtttgtatcaataatagcaacatatgaagaacacgtttatacagagtatgtaaaaatgttaatttatagtttaatcccatggcccacgcacacacgattaattttttttcatctccctttagattgttgtatagaaatttgggtactgtgaactccgccgtagtttccatgggactatataattttgtggcctcgaatacaaattttactacatagttatctatcttaaagactataccatatcctcctgtagatatgtgataaaaatcgtcgtttataggataaaatcgtttatccttttgttggaaaaaggatgaattaatgtaatcattctcttctatctttagtagtgtttccttattaaaattcttaaaataatttaacaatctaactgacggagcccaattttggtgtaaatctaattgggacattatattgttaaaatacaaacagtctcctaatataacagtatctgataatctatggggagacatccattgatattcaggggatgaatcattggcaacacccatttattgtacaaaaagccccaatttacaaacgaaagtccaggtttgatagagacaaacaattaactattttgtctctgtttttaacacctccacagtttttaatttctttagtaatgaaattattcacaatatcagtatcttctttatctaccagagattttactaacttgataaccttggctgtctcattcaatagggtagtaatatttgtatgtgtgatattgatatctttttgaattgtttcttttagaagtgattctttgatggtgccagcatacgaattacaataatgcagaaactcggttaacatgcaggaattatagtaagccaattccaattgttgcctgtgttgtattagagtgtcaatatgagcaatggtgtccttgcgtttctctgatagaatgcgagcagcgattttggcgttatcatttgacgatatttctggaatgacgaatcctgtttctactaactttttggtaggacaaagtgaaacaatcaagaagatagcttctcctcctatttgtggaagaaattgaactcctctagatgatctactgacgatagtatctccttgacagatattggaccgaattacagaagtacctggaatgtaaagccctgaaaccccctcattttttaagcagattgttgccgtaaatcctgcactatgcccaagatagagagctcctttggtgaatccatctctatgtttcagtttaaccaagaaacagtcagctggtctaaaatttccatctctatctaatacagcatctaacttgatgtcaggaactatgaccggtttaatgttatatgtaacattgagtaaatccttaagttcataatcatcactgtcatcagttatgtacgatccaaacaatgtttctaccggcatagtggatacgaagatgctatccatcagaatgtttccctgattagtattttctatatagctattcttctttaaacgattttccaaatcagtaactatgttcatttttttaggagtaggacgcctagccagtatggaagaggattttctagatcctctcttcaacatctttgatctcgatggaatgcaaaaccccatagtgaaacaaccaacgataaaaataatattgtttttcactttttataattttaccatctgactcatggattcattaatatctttataagagctactaacgtataattctttataactgaactgagatatatacaccggatctatggtttccataattgagtaaatgaatgctcggcaataactaatggcaaatgtatagaacaacgaaattatactagagttgttaaagttaatattttctatgagctgttccaataaattatttgttgtgactgcgttcaagtcataaatcatcttgatactatccagtaaaccgtttttaagttctggaatattatcatcccattgtaaagcccctaattcgactatcgaatatcctgctctgatagcagtttcaatatcgacggacgtcaatactgtaataaaggtggtagtattgtcatcatcgtgataaactacgggaatatggtcgttagtaggtacggtaactttacacaacgcgatatataactttccttttgtaccatttttaacgtagttgggacgtcctgcagggtattgttttgaagaaatgatatcgagaacagatttgatacgatatttgttggattcctgattattcactataatataatctagacagatagatgattcgataaatagagaaggtatatcgttggtaggataatacatccccattccagtattctcggatactctattgatgacactagttaagaacatgtcttctattctagaaaacgaaaacatcctacatggactcattaaaacttctaacgctcctgattgtgtctcgaatgcctcgtacaaggatttcaaggatgccatagattctttgaccaacgatttagaattgcgtttagcatctgatttttttattaaatcgaatggtcggctctctggtttgctaccccaatgataacaatagtcttgtaaagataaaccgcaagaaaatttatacgcatccatccaaataaccctagcaccatcggatgatattaatgtattattatagattttccatccacaattattgggccagtatactgttagcaacggtatatcgaatagattactcatgtaacctactagaatgatagttcgtgtactagtcataatatctttaatccaatctaaaaaatttaaaattagattttttacactgttaaagttaacaaaagtattacccgggtacgtggatatcatatatggcattggtccattatcagtaatagctccataaactgatacggcgatggtttttatatgtgtttgatctaacgaggaagaaattcgcgcccacaattcatctctagatatgtatttaatatcaaacggtaacacatcaatttcgggacgcgtatatgtttctaaatttttaatccaaatataatgatgacctatatgccctattatcatactgtcaactatagtacacctagggaacttacgatacatctgtttcctataatcgttaaattttacaaatctataacatgctaaaccttttgacgacagccattcattaatttctgatatggaatctgtattctcgataccgtatcgttctaaagccagtgctatatctccctgttcgtgggaacgctttcgtataatatcgatcaacggataatctgaagtttttggagaataatatgactcatgatctatttcgtccataaacaatctagacataggaattggaggcgatgatcttaattttgtgcaatgagtcgtcaatcctataacttctaatcttgtaatattcatcatcgacataatactatctatgttatcatcgtatattagtataccatgaccttcttcatttcgtgccaaaatgatatacagtcttaaatagttacgcaatatctcaatagtttcataattgttagctgttttcatcaaggtttgtatcctgtttaacatgatggcgttctataacgtctctattttctatttttaattttttaaatttttaacgatttactgtggctagatacccaatctctctcaaatatttttttagcctcgcttacaagctgtttatctatactattaaaactgacgaatccgtgattttggtaatgggttccgtcgaaatttgccgaagtgatatgaacatattcgtcgtcgactatcaacaattttgtattattctgaatagtgaaaaccttcacagatagatcattttgaacacacaacgcatctagacttttggcggttgccatagaatatacgtcgttcttatcccaattaccaactagaagtctgatcttaactcctctattaatggctgcttctataatggagttgtaaatgtcgggccaatagtagctattaccgtcgacacgtgtagtgggaactatggccaaatgttcaatatctatactagtcttagctgacctgagtttatcaataactacatcggtatctagatctctagaatatcccaataggtgttccggagaatcagtaaagaacactccacctataggattcttaatatgatacgcagtgctaactggcaaacaacaagccgcagagcataaattcaaccatgaattttttgcgctattaaaggctttaaaagtatcaaatcttctacgaagatctgtggccagcgggggataatcagaatatacacctaacgttttaatcgtatgtatagatcctccagtaaatgacgcgtttcctacataacatctttcatcatctgacacccaaaaacaaccgagtagtagtcccacattattttttttatctatattaacggttataaaatttatatccgggcagtgactttgtagctctcccagatttcttttccctcgttcatctagcaaaactattattttaatcccttttttagatgcctcttttagtttatcaaaaataagcgctcccctagtcgtactcagaggattacaacaaaaagatgctatgtatatatatttcttagctagagtgataatttcgttaaaacattcaaatgttgttaaatgatcggatctaaaatccatattttctggtagtgtttctaccagcctacattttgctcccgcaggtaccgatgcaaatggccacatttagttaacataaaaacttatacatcctgttctatcaacgattctagaatatcatcggctatatcgctaaaattttcatcaaagtcgacatcacaacctaactcagtcaatatattaagaagttccatgatgtcatcttcgtctatttctatatccgtatccattgtagattgttgaccgattatcgagtttaaatcattactaatactcaatccttcagaatacaatctgtatttcattgtaaatttataggcggtgtatttaagttggtagattttcaattatgtatcaatatagcaacagtagttcttgctcctccttgattctagcatcctcttcattattttcttctacgtacataaacatgtccaatacgttagacaacacaccgacgatggcggccgctacagacacgaatatgactagaccgatgaccatttaaaaacccctctctagctttcacttaaactgtatcgatcattcttttagcacatgtataatataaaaacattattctatttcgaatttaggcttccaaaaatttttcatccgtaaaccgataataatatatatagacttgttaatagtcggaataaatagattaatgcttaaactatcatcatctccacgattagagatacaatatttacattctttttgctgtttcgaaactttatcaatacacgttaatacaaacccaggaaggagatattgaaactgaggctgttgaaaatgaaacggtgaatacaataattcagataatgtaaaatcatgattccgtattctgatgatattagaactgctaatggatgtcgatggtatgtatctaggagtatctattttaacaaagcatcgatttgctaatatacaattatcattttgattaattgttattttattcatattcttaaaaggtttcatatttatcaattcttctacattaaaaatttccatttttaatttatgtagccccgcaatactcctcattacgtttcattttttgtctataatatccattttgttcatctcggtacatagattatccaattgagaagcgcatttagtagttttgtacattttaagtttattgacgaatcgtcgaaaactagttatagttaacattttattatttgataccctgatattaatacccctgccgttactattatttataactgatgtaacccacgtaacattagaattaattatcgatagtaatgcatcaacgcttccaaaattgtctattataaactcaccgataatttttttattgcatgttttcatattcattaggattatcaaatctttaatcttattacgattgtatgcgttgatattacaagacgtcattctaaaagacggaggatttccatcaaatgccagacaatcacgtacaaagtacatggaaataggttttgttctattgcgcatcatagatttatatagaacacccgtagaaatactaatttgttttactctataaaatactaatgcatctatttcatcgttttgtataacgtctttccaagtgtcaaattccaaatttttttcattgatagtaccaaattcttctatctctttaactacttgcatagataggtaattacagtgatgcctacatgccgttttttgaaactgaatagatgcgtctagaagcgatgctacgctagtcacaatcaccactttcatatttagaatatatatatgtaaaaatatagtagaatttcattttgttttttctatgctataaatgaattctcattttgcatctgctcatactccgttttatatcaataccaaagaaggaagatatctggttctaaaagccgttaaagtatgcgatgttagaactgtagaatgcgaaggaagtaaagcttcctgcgtactcaaagtagataaaccctcatcacccgcgtgtgagagaagaccttcgtccccgtccagatgcgagagaatgaataaccctggaaaacaagttccgtttatgagaacggacatgctacaaaatatgttcgcggctaatcgcgataatgtagcttctagacttttgtcctaaaatacaattatatccttttcgatattaataaatccgtgtcgtccaggttttttatctctttcagtatgtgaatagataggtattttatctctattcatcatcgaatttaagagatccgataaacattgtttgtattctccagatgtcagcatctgatacaacaatatatgtgcacataaacctctggcacttatttcatgtaccttccccttatcactaaggagaatagtatttgagaaatatgtatacatgatattatcatgaattagatatacagaatttgtaacactctcgaaatcacacgatgtgtcggcgttaagatctaatatatcactcgataacacattttcatctagatacactagacattttttaaagctaaaatagtctttagtagtaacagtaactatgcgattattttcatcgatgatacatttcatcggcatattattacgcttaccatcaaagactataccatgtgtatatctaacgtattctagcatggttgccatacgcgcattaaacttttcaggatctttggatagatcttccaatctatctatttgagaaaacatttttatcatgttcaatagttgaaacgtcggatccactatatagatattatctataaagattttaggaactacgttcatggtatcctggcgaatattaaaactatcaatgatatgattatcgttttcatcttttatcaccatatagtttctaagatatgggattttacttaatataatattatttcccgtgataaattttattagaaaggccaaatctataagaaaagtcctagaattagtctgaagaatatctatatcgccgtatagtatatttggattaattagatatagagaatatgatccgtaacatatacaacttttattatggcgtctaagatattcttccatcaacttattaacatttttgactagggaagatacattatgacgtcccattacttttgccttgtctattactgcgacgttcatagaatttagcatatctcttgccaattcttccattgatgttacattataagaaattttagatgaaattacatttggagctttaatagtaagaactcctaatatgtccgtgtatgtggtcactaatacagattgtagttctataatcgtaaataatttacctatattatatgtttgagtctgtttagaaaagtagctaagtatacgatcttttatttctgatgcagatgtattaacatcggaaaaaaatctttttttattcttttttactaaagatacaaatatgtctttgttaaaaacagttattttctgaatatttctagcttgtaattttaacatatgatattcgttcacactaggtactctgcctaaataggtttctataatctttaatgtaatattaggaaaagtattctgatcaggattcctattcattttgaggatttaaaactctgattattgtctaatatggtctctacgcaaactttttcacagagcgatagagtttttgataactcgtttttcttaagaaatataaaactactgtttccagagctcgctctatcttttattttatctaattcgatacaaactcctgatactggttcagaaagtaattcattaattttcagtcctttatagaagatatttaatatagataatacaaaatcttcagtttttgatatcgatctgattgatcctagaactagatatattaataacgtgctcattaggcagtttatggcagcttgataattagatatagtatattccagttcatatttattagataccgcattgcccagattttgatattctatgaattcctctgaaaataaatccaaaataactagacattctattttttgtggattagtgtactctcttccctctatcatgttcactactggtgtccacgatgataaatatctagagggaatataatatagtccataggatgccaatctagcaatgtcgaataactgtaatttgattcttcgttcttcattatgaattgattcttgaggtataaacctaacacaaattatattattagacttttcgtatgtaatgtctttcatgttataagtttttaatcctggaatagaatctattttaatgaggcttttaaacgcagagttctccaacgagtcaaagcataatactctgttgtttttcttatatacgatgttacgattttcttctttgaatggaataggtttttgaattagtttataattacaacataatagataaggaagtgtgcaaatagtacgcggaaaaaacataatagctcccctgttttcatccatggttttaagtaaatgatcactggcttctttagtcaatggatattcgaacattaaccgtttcatcatcattggacagaatccatattttttaatgtaaagagtgatcaaatcattgtgtttattgtaccatcttgttgtaaatgtgtattcggttatcggatctgctcctttttctattaaagtatcgatgtcgatctcgtctaagaattcaactatatcgacatatttcatttgtatacacataaccattactaacgtagaatgtataggaagagatgtaacgggaacagggtttgttgattcgcaaactattctaatacataattcttctgttaatacgtcttgcacgtaatctattatagatgccaagatatctatataattattttgtaagatgatgttaactatgtgatctatataagtagtgtaataattcatgtatttcgatatatgttccaactctgtctttgtgatgtctagtttcgtaatatctatagcatcctcaaaaaatatattcgcatatattcccaagtcttcagttctatcttctaaaaaatcttcaacgtatggaatataataatctattttacctcttctgatatcattaatgatataatttttgacactatcttctgtcaattgattcttattcactatatctaagaaacggatagcgtccctaggacgaactactgccattaatatctctattatagcttctggacataattcatctattataccagaattaatgggaactattccgtatctatctaacatagttttaagaaagtcagaatctaagacctgatgttcatatattggttcatacatgaaatgatctctattgatgatagtgactatttcattctctgaaaattggtaactcattctatatatgctttccttgttgatgaaggatagaatatactcaatagaatttgtaccaacaaactgttctcttatgaatcgtatatcatcatctgaaataatcatgtaaggcatacatttaacaattagagacttgtctcctgttatcaatatactattcttgtgataatttatgtgtgaggcaaatttgtccacgttctttaattttgttatagtagatatcaaatccaatggagctacagttcttggcttaaacagatatagtttttctggaacaaattctacaacattattataaaggactttgggtagataagtgggatgaaatcctattttaattaatgcgatagccttgtcctcgtgcagatatccaaacgcttttgtgatagtatggcattcattgtctagaaacgctctacgaatatctgtgacagatatcatctttagagaatatactagtcgcgttaatagtactacaatttgtattttttaatctatctcaataaaaaaattaatatgtatgattcaatgtataactaaactactaactgttattgataactagaatcagaatctaatgatgacgtacccaagaagtttatctactgccaatttagctgcattatttttagcatctcgtttagattttccatctgccttatcgaatactcttccgtcgatatctacacaggcataaaatgtaggagagttactaggcccaactgattcaatacgaaaagaccaatctctcttagttatttggcagtactcattaataacggtgacagggttagcatctttccaatcaataatttttttagccggaataacatcatcaaaagacttatgatcctctctcattgatttttcgcgggatacatcatctattatgacgtcagccataacatcagcatccggcttatccgcctccgttgtcataaaccaacgaggaggaatatcgtcggagctgtacaccatagcactacgttgaagatcgtacagagctttattaacttctcgcttctccatattaagttgtctagttagttgtgcagcagtagctccttcgattccaatggttttaatagcctcacacacaatctctgcgttagaacgttcgtcgatatagattttagacatttttagagagaactaacacaaccagcaataaaactgaacctactttatcatttttttattcatcatcctctggtggttcgtcgttcctatcaaatgtagctctgattaacccgtcatctataggtgatgctggttctggagattctggaggagatggattattatctggaagaatctctgttatttccttgttttcatgtatcgattgcgttgtaacattaagattgcgaaatgctctaaatttgggaggcttaaagtgttgtttgcaatctctacacgcgtgtctaactagtggaggttcgtcagctgctctagtttgaatcatcatcggcgtagtattcctacttttacagttaggacacggtgtattgtatttctcgtcgagaacgttaaaataatcgttgtaactcacatcctttattttatctatattgtattctactcctttcttaatgcattttataccgaataagagatagcgaaggaattctttttcggtgccgctagtacccttaatcatatcacatagtgttttatattccaaatttgtggcaatagacggtttatttctatacgatagtttgtttctggaatcctttgagtattctataccaatattattctttgattcgaatttagtttcttcgatattagattttgtattacctatattcttgatgtagtactttgatgatttttccatggcccattctattaagtcttccaagttggcatcatccacatattgtgatagtaattctcggatatcagtagcggctaccgccattgatgtttgttcattggatgagtaactactaatgtatacattttccatttataacacttatgtattaactttgttcatttatattttttcattattatgttgatattaacaaaagtgaatatatatatatgttaataattgtattgtggttatacggctacaattttataatgagtgaaagtcagtgtccgatgatcaatgacgatagctttactctgaaaagaaagtatcaaatcgatagtgcggagtcaacaataaaaatggataagaagaggataaagtttcagaatagagccaaaatggtaaaagaaataaatcagacaataagagcagcacaaactcattacgagacattgaaactaggatacataaaatttaagagaatgattaggactactactctagaagatatagcaccatctattccaaataatcagaaaacttataaactattctcggacatttcagccatcggcaaagcatcacagaatccgagtaagatggtatatgctctgctgctttacatgtttcccaatttgtttggagatgatcatagattcattcgttatagaatgcatccaatgagtaaaatcaaacacaagatcttctctcctttcaaacttaatcttattagaatattagtggaagaaagattctataataatgaatgcagatctaataaatggaaaataattggaacacaagttgataaaatgttgatagctgaatctgataaatatacaatagatgcaaggtataacctaaaacccatgtatagaatcaagggagaatctgaagaagataccctcttcatcaaacagatggtagaacaatgtgtgacatcccaggaattggtggaaaaagtgttgaagatactgtttagagatttgttcaagagtggagaatacaaagcgtacagatacgatgatgatgtagaaaatggattcattggattggatacactaaaattaaacattgttcatgatatagttgaaccatgtatgcctgttcgtaggccagtggctaagatactgtgtaaagaaatggtaaataaatactttgagaatccgctacatattattggtaaaaatcttcaagagtgcattgactttgttagtgaataggcatttcatctttctccaatactaattcaaattgttaaattaataatggatagtataaatagttattagttataagatagtaaaaataattattagaataagagtgtagtatcatagataactctcttctataaaaatggattttattcgtagaaagtatcttatatacacagtagaaaataatatagattttttaaaggatgatacattaagtaaagtaaacaattttaccctcaatcatgtactagctctcaagtatctagttagcaattttcctcaacatgttattactaaggatgtattagctaataccaatttttttgttttcatacatatggtacgatgttgtaaagtgtacgaagcggttttacgacacgcatttgatgcacccacgttgtacgttaaagcattgactaagaattatttatcgtttagtaacgcaatacaatcgtacaaggaaaccgtgcataaactaacacaagatgaaaaatttttagaggttgccgaatacatggacgaattaggagaacttataggcgtaaattatgacttagttcttaatccattatttcacggaggggaacccatcaaagatatggaaatcatttttttaaaactgtttaagaaaacagacttcaaagttgttaaaaaattaagtgttataagattacttatttgggcatacctaagcaagaaagatacaggcatagagtttgcggataatgatagacaagatatatatactctatttcaacaaactggtagaatcgtccatagcaatctaacagaaacgtttagagattatatctttcccggagataagactagctattgggtgtggttaaacgaaagtatagctaatgatgcggatatcgttcttaatagacccgccattaccatgtatgataaaattcttagttatatatactctgagataaaacaaggacgcgttaataaaaacatgcttaagttagtttatatctttgagcctgaaaaagatatcagagaacttctgctagaaatcatatatgatattcctggagatatcctatctattattgatgcaaaaaacgacgattggaaaaaatattttattagtttttataaagctaattttattaacggtaatacatttattagtgatagaacgtttaacgaggacttattcagagttgttgttcaaatagatcccgaatatttcgataatgaacgaattatgtctttattctctacgagtgctgcggacattaaacgatttgatgagttagatattaataacagttatatatctaatataatttatgaggtgaacgatatcacattagatacaatggatgatatgaagaagtgtcaaatctttaacgaggatacgtcgtattatgttaaggaatacaatacatacctgtttttgcacgagtcggatcccatggtcatagagaacggaatactaaagaaactgtcatctataaaatccaagagtagacggctgaacttgtttagcaaaaacattttaaaatattatttagacggacaattggctcgtctaggtcttgtgttagatgattataaaggagacttgttagttaaaatgataaaccatcttaagtctgtggaggatgtatccgcattcgttcgattttctacagataaaaaccctagtattcttccatcgctaatcaaaactattttagctagttataatatttccatcatcgtcttatttcaaaggtttttgagagataatctatatcatgtagaagaattcttggataaaagcatccatctaaccaagacggataagaaatatatacttcaattgataagacacggtagatcatagaacagaccaaatatattattaataatttgtatatacatagatataattatcacacatttttgataaatgggaactgctgcaacaattcagactcccaccaaattaatgaataaagaaaatgcagaaatgattttggaaaaaattgttgatcatatagttatgtatattagtgacgaatcaagtgattcagaaaataatcctgaatatattgattttcgtaacagatacgaagactatagatctctcattataaaaagtgatcacgagtttgtaaagctatgtaaaaatcatgcggagaaaagttctccagaaacgcaacaaatgattatcaaacacatatacgaacaatatcttattccagtatctgaagtactattaaaacctataatgtccatgggtgacataattacatataacggatgtaaagacaatgaatggatgctagaacaactctctaccctaaactttaacaatctccgcacatggaactcatgtagcataggcaatgtaacgcgtctgttttatacattttttagttatctgatgaaagataaactaaatatataagtataatcccattctaatactttaacctgatgtattagcatcttattagaatattaacctaactaaaagacataacataaaaactcattacatagttgataaaaagcggtaggatataaatattatggctgccaccgttccgcgttttgacgacgtgtacaaaaatgcacaaagaagaattctagatcaagaaacattttttagtagaggtctaagtagaccgttaatgaaaaacacatatctatttgataattacgcgtatggatggataccagaaactgcaatttggagtagtagatacgcaaacttagatgcaagtgactattatcccatttcgttgggattacttaaaaagttcgagtttctcatgtctctatataaaggtcctattccagtatacgaagaaaaagtaaatactgaattcattgctaatggatctttctccggtagatacgtatcatatcttagaaagttttctgctcttccaacaaacgagtttattagttttttgttactgacttccattccaatctataatatcttgttctggtttaaaaatactcagtttgatattactaaacacacattattcagatacgtctatacagataatgccaaacacctggcgttggctaggtatatgtatcaaacaggagactataagcctttgtttagtcgtctcaaagagaattatatatttaccggtcccgttccaatatgtatcaaagatatagatcaccctaatcttagtagagcaagaagtccatccgattatgagacattagctaatattagtactatattgtactttaccaagtatgatccggtattaatgtttttattgttttacgtacctgggtattcaattactacaaaaattactccagccgtagaatatctaatggataaactgaatctaacaaagagcgacgtacaactgttgtaaattattttatgcttcgtaaaatgtaggttttgaaccaaacattctttcaaagaatgagatgcataaaactttattatccaatagattgactatttcggacgtcaatcgtttaaagtaaacttcgtaaaatattctttgatcactgccgagtttaaaacttctatcgataattgtctcatatgttttaatatttacaagttttttggtccatggtacattagccggacaaatatatgcaaaataatatcgttctccaagttctatagtttctggattatttttattatattcagtaaccaaatacatattagggttatctgcggatttataatttgagtgatgcattcgactcaacataaataattctagaggagacgatctactatcaaattcggatcgtaaatctgtttctaaagaacggagaatatctatacatacctgattagaattcatccgtccttcagacaacatctcagacagtctggtcttgtatgtcttaatcatattcttatgaaacttggaaacatctcttctagtttcactagtacctttattaattctctcaggtacagattttgaattcgacgatgccgagtatttcatcgttgtatatttcttcttcgattgcataatcagattcttatataccgcttcaaactctattttaaaattattaaacaatactctattattaatcagtcgttctaactctttcgctatttctatagacttatcgacatcttgactgtctatctctgtaaacacggagtcggtatctccatacacgctacgaaaacgaaatctgtaatctataggcaacgatgttttcacaatcggattaatatctctatcgtccatataaaatggattacttaatggattggcaaaccgtaacataccgttagataactctgctccatttagtaccgattctagatacaagatcattctacgtcctatggatgtgcaactcttagccgaagcgtatgagtatagagcactatttctaaatcccatcagaccatatactgagttggctactatcttgtacgtatattgcatggaatcatagatggccttttcagttgaactggtagcctgttttagcatctttttatatctggctctctctgccaaaaatgttcttaatagtctaggaatggttccttctatcgatctatcgaaaattgctatttcagagatgaggttcggtagtctaggttcacaatgaaccgtaatatatctaggaggtggatatttctgaagcaatagctgattatttatttcttcttccaatctattggtactaacaacgacaccgactaatgtttccggagatagatttccaaagatacacacattaggatacagactgttataatcaaagattaatacattattactaaacattttttgttttggagcaaataccttaccgccttcataaggaaacttttgttttgtttctgatctaactaagatagttttagtttccaacaatagctttaacagtggacccttgatgactgtactcgctctatattcgaataccatggattgaggaagcacatatgttgacgcacccgcgtctgtttttgtttctactccataatactcccacaaatactgacacaaacaagcatcatgaatacagtatctagccatatctaaagctatgtttagattataatccttatacatctgagctaaatcaacgtcatcctttccgaaagataatttatatgtatcattaggtaaagtaggacataatagtacgactttaaatccattttcccaaatatctttacgaattactttacatataatatcctcatcaacagtcacataattacctgtggttaaaacctttgcaaatgcagcggctttgcctttcgcgtctgtagtatcgtcaccgatgaacgtcatttctctaactcctctatttaatactttacccatgcaactgaacgcgttcttggatatagaatccaatttgtacgaatccaatttttcaaatttttgaatgaatgaatatagatcgaaaaatatagttccattattgttattaacgtgaaacgtagtattggccatgccgcctactcccttatgactagactgatttctctcataaatacagagatgtacagcttcctttttgtccggagatctaaagataatcttctctcctgttaataactctagacgattagtaatatatctcagatcaaagttatgtccgttaaaggtaacgacgtagtcgaacgttagttccaacaattgtttagctattcgtaacaaaactatttcagaacatagaactagttctcgttcgtaatccatttccattagtgactgtatcctcaaacatcctctatcgacggcttcttgtatttcctgttccgttaacatctcttcattaatgagcgtaaacaataatcgtttaccacttaaatcgatataacagtaacttgtatgcgagattgggttaataaatacagaaggaaacttcttatcgaagtgacactctatatctagaaataagtacgatcttgggatatcgaatctaggtatttttttagcgaaacagttacgtggatcgtcacaatgataacatccattgttaatctttgtcaaatattgctcgtccaacgagtaacatccgtctggagatatcccgttagaaatataaaaccaactaatattgagaaattcatccatggtggcattttgtatgctgcgtttctttggctcttctatcaaccacatatctgcgacggagcattttctatctttaatatctagattataacttattgtctcgtcaatgtctatagttctcatctttcccaacggcctcgcattaaatggaggaggagacaatgactgatatatttcgtccgtcactacgtaataaaagtaatgaggaaatcgtataaatacggtctcaccatttcgacatctggatttcagatataaaaatctgttttcaccgtgactttcaaaccaattaatgcaccgaacatccatttatagaatttagaaatatattttcatttaaatgaatcccaaacattggggaagagccgtatggaccattatttttatagtactttcgcaagcgggtttagacggcaacatagaagcgtgtaaacgaaaactatatactatagttagcactcttccatgtcctgcatgtagacggcacgcgactatcgctatagaggacaataatgtcatgtctagcgatgatctgaattatatttattattttttcatcagattatttaacaatttggcatctgatcccaaatacgcgatcgatgtgacaaaggttaaccctttataaacttaacccattataaaacttatgattagtcacaactgaaataaccgcgtgattattttttggtataattctacacggcatggtttctgtgactatgaattcaacccccgttacattagtgaaatctttaacaaacagcaagggttcgtcaaagacataaaactcattgtttacaatcgaaatagaccccctatcacacttaaaataaaaaatatccttatcctttaccaccaaataaaattctgattggtcaatgtgaatgtattcacttaacagttccacaaatttatttattaactccgaggcacatacatcgtcggtattttttatggcaaactttactcttccagcatccgtttctaaaaaaatattaacgagttccatttatatcatccaatattattgaaatgacgttgatggacagatgatacaaataagaaggtacggtacctttgtccaccatctcctccaattcatgctctattttgtcattaactttaatgtatgaaaacagtacgccacatgcttccatgacagtgtgtaacactttggatacaaaatgtttgacattagtataattgttcaagactgtcaatctataatagatagtagctataatatattctatgatggtattgaagaagatgacaaccttggcatattgatcatttaacacagacatggtatcaacagatagcttgaatgaaagagaatcagtaattggaataagcgtcttctcgatagagtgtccgtataccaacatgtctgatattttgatgtattccattaaattatttagttttttctttttattctcgttaaacagcatttctgtcaacggaccccaacatcgttgaccgattaagttttgattgatttttccgtgtaaggcgtatctagtcagatcgtatagcctatccaataatccatcatctgtgcgtagatcacatcgtacactttttaattctctatagaagagcgacagacatctggagcaattacagacagcaatttctttattctctacagatgtaagatacttgaagacattcctatgatgatgcagaattttggataacacggtattgatggtatctgttaccataattcctttgatggctgatagtgtcagagcacaagatttccaatctttgacaatttttagcaccattatctttgttttgatatctatatcagacagcatggtgcgtctgacaacacagggattaagacggaaagatgaaatgattctctcaacatcttcaatagataccttgctattttttctggcattatctatatgtgcgagaatatcctctagagaatcagtatcctttttgatgatagtggatctcaatgacatgggacgtttaaaccttcttattctatcaccagattgcatggtgatttgtcttctttcttttatcataatgtaatctctaaattcatcggcaaattgtctatatctaaaatcataatatgagatgtttacctctacaaatatctgttcgtccaatgttagagtatttacatcagttttgtattccaaattaaacatggcaacggatttaattttatattcctctattaagtcctcgtcgataataacagaatgtagataatcatttaatccatcgtacatggttggaagatgcttgttgacaaaatctttaattgtcttgatgaaggtgggactatatctaacatcttgattaataaaatttataacattgtccataggatactttgtaactagttttatacacatctcttcatcggtaagtttagacagaatatcgtgaacaggtggtatattatattcatcagatatacgaagaacaatgtccaaatctatattgtttaatatattatatagatgtagcgtagctcctacaggaatatctttaactaagtcaatgatttcatcaaccgttagatctattttaaagttaatcatataggcattgatttttaaaaggtatgtagccttgactacattctcattaattaaccattccaagtcactgtgtgtaagaagattatattctatcataagcttgactacatttggtcccgataccattaaagaattcttatgatataaggaaacagcttttaggtactcatctactctacaagaattttggagagccttaacgatatcagtgacgtttattatttcaggaggaaaaaacctaacattgagaatatcggaattaatagcttccagatacagtgattttggcaatagtccgtgtaatccataatccagtaacacgagctggtgcttgctagacaccttttcaatgtttaatttttttgaaataagctttgataaagccttcctcgcaaattccggatacatgaacatgtcggcgacatgattaagtattgttttttcattatttttatattttctcaacaagttctcaataccccaatagatgatagaatatcacccaatgcgtccatgttgtctatttccaacaggtcgctatatccaccaatagaagtttttccaaaaaagattctaggaacagttctaccaccagtaatttgttcaaaatagtcacgcaattcattttcgggtttaaattctttaatatcgacaatttcatacgctcctcttttgaaactaaacttatttagaatatccagtgcatttctacaaaaaggacatgtatacttgacaaaaattgtcactttgttattggccaacctttgttgtacaaattcctcggccattttaatatttaagtgatataaaactatctcgacttatttaactctttagtcgagatatatggacgcagatagctatatgatagccaactacagaaggcaaacgctataaaaaacataattacgacgagcatatttataaatatttttattcagcattacttgatatagtaatattaggcacagtcaaacattcaaccactctcgatacattaactctctcattttctttaacaaattctgcaatatcttcgtaaaaagattcttgaaactttttagaatatctatcgactctagatgaaatagcgttcgtcaacatactatgttttgtatacataaaggcgcccattttaacagtttctagtgacaaaatgctagcgatcctaggatcctttagaatcacatagattgacgattcgtctctcttagtaactctagtaaaataatcatacaatctagtacgcgaaataatattatccttgacttgaggagatctaaacaatctagttttgagaacatcgataagttcatcgggaatgacatacatactatctttaatagaactcttttcatccagttgaatggattcgtccttaaccaactgattaatgagatcttctattttatcattttccagatgatatgtatgtccattaaagttaaattgtgtagcgcttctttttagtctagcagccaatactttaacatcactaatatcgatatacaaaggagatgatttatctatggtattaagaattcgtttttcgacatccgtcaaaaccaattcctttttgcctgtatcatccagttttccatcctttgtaaagaaattattttctactagactattaataagactgataaggattcctccataattgcacaatccaaactttttcacaaaactagactttacaagatctacaggaatgcgtacttcaggttttttagcttgtgattttttcttttgcggacattttcttgtgaccaactcatctaccatttcattgattttagcagtgaaataagctttcaatgcacgggcactgatactattgaaaacgagttgatcttcaaattccgccatttaagttcaccaaacaacttttaaatacaaatatatcaatagtagtagaataagaactataaaaaaaataataattaaccaataccaaccccaacaaccggtattattagttgatgtgactgttttctcatcacttagaacagatttaacaatttctataaagtctgtcaaatcatcttccggagaccccataaatacaccaaatatagcggcgtacaacttatccatttatacattgaatattggcttttctttatcgctatcttcatcatattcatcatcaatatcaacaagtcccagattacgagccagatcttcttctacattttcagtcattgatacacgttcactatctccagagagtccgataacgttagccaccacttctctatcaatgattagtttcttgagcgcgaaagtaatttttgtttccgttccggatctatagaagacgataggtgtgataattgccttggccaattgtctttctcttttactgagtgattctagttcaccttctatagatctgagaatggatgattctccagtcgaaacatattctaccatggatccgtttaatttgttgatgaagatggattcatccttaaatgttttctctgtaatagtttccaccgaaagactatgcaaagaatttggaatgcgttccttgtgcttaatgtttccatagacggcttctagaagttgatacaacataggactagccgcggtaacttttatttttagaaagtatccatcgcttctatcttgtttagatttatttttataaagtttagtctctccttccaacataataaaagtggaagtcatttgactagataaactatcagtaagttttatagagatagacgaacaattagcgtattgagaagcatttagtgtaacgtattcgatacattttgcattagatttactaatcgattttgcatactctataacacccgcacaagtctgtagagaatcgctagatgcagtaggtcttggtgaagtttcaactctcttcttgattaccttactcatgattaaacctaaataattgtactttgtaatataatgatatatattttcactttatctcatttgagaataaaaatgtttttgtttaaccactgcatgatgtacagatttcggaatcgcaaaccaccagtggttttattttatccttgtccaatgtgaattgaatgggagcggatgcgggtttcgtacgtagatagtacattcccgtttttagaccgagactccatccgtaaaaatgcatactcgttagtttggaataactcggatctgctatatggatattcatagattgactttgatcgatgaaggctcccctgtctgcagccatttttatgatcgtcttttgtggaatttcccaaatagttttataaactcgcttaatatcttctggaaggtttgtattctgaatggatccaccatctgccataatcctattcttgatctcatcattccataattttctctcggttaaaactctaaggagatgcggattaactacttgaaattctccagacaatactctccgagtgtaaatattactggtatacggttccaccgactcattatttcccaaaatttgagcagttgatgcagtcggcataggtgccaccaataaactatttctaagaccgtatgttctgattttatcttttagaggttcccaattccaaagatccgacggtacaacattccaaagatcatattgtagaataccgttactggcgtacgatcctacatatgtatcgtatggtccttccttctcagctagttcacaactcgcctctaatgcaccgtaataaatggtttcgaagatcttcttatttagatcttgtgcttccaggctatcaaatggataatttaagagaataaacgcgtccgctaatccttgaacaccaataccgataggtctatgtctcttattagagatttcagcttctggaataggataataattaatatctataattttattgagatttctgacaattactttgaccacatccttcagtttgagaaaatcaaatcgcccatctattacaaacatgttcaaggcaacagatgccagattacaaacggctacctcattagcatccgcatattgtattatctcagtgcaaagattactacacttgatagttcctaaattttgttgattactctttttgttacacgcatccttataaagaatgaatggagtaccagtttcaatctgagattctataatcgctttccagacgactcgagcctttattatagatttgtatctcctttctctttcgtatagtgtatacaatcgttcgaactcgtctccccaaacattgtccaatccaggacattcatccggacacatcaacgaccactctccgtcatccttcactcgtttcataaagagatcaggaatccaaagagctataaatagatctctggttctatgttcctcgtttcctgtattctttttaagatcgaggaacgccataatatcagaatgccacggttccaagtatatggccataactccaggccgtttgtttcctccctgatctatgtatctagcggtgttattataaactctcaacattggaataataccgtttgatataccattggtaccggagatatagcttccactggcacgaatattactaattgatagacctattccccctgccattttagagattaatgcgcatcgttttaacgtgtcatagataccctctatgctatcatcgatcatgttaagtagaaaacagctagacatttggtgacgactagttcccgcattaaataaggtaggagaagcgtgcgtaaaccatttttcagaaagtagattgtacgtctcaatagctgagtctatatcccattgatgaattcctactgcgacacgcattaacatgtgctgaggtctttcaacgatcttgttgtttattttcaacaagtaggatttttccaaagttttaaaaccaaaatagttgtatgaaaagtctcgttcgtaaataataaccgagttgagtttatccttatatttgttaactatatccatggtgatacttgaaataatcggagaatgtttcccatttttaggattaacatagttgaataaatcctccatcacttcactaaatagtttttttgtttccttgtgtagatttgatacggctattctggcggctagaatggcataatccggatgttgtgtagtacaagtggctgctatttcggctgccagagtgtccaattctaccgttgttactccattatatattccttgaataaccttcatagctattttaataggatctatatgatccgtgtttaagccataacataattttctaatacgagacgtgattttatcaaacatgacattttccttgtatccatttcgtttaatgacaaacatttttgttggtgtaataaaaaaattatttaacttttcattaatagggatttgacgtatgtagcgtacaaaatgatcgttcctggtatatagataaagagtcctatatatttgaaaatcgttacggctcgattaaactttaatgattgcatagtgaatatatcattaggatttaactccttgactatcatggcggcgccagaaattaccatcaaaagcattaatacagttatgccgatcgcagttaaaacggttatagcatccaccatttatatctaaaaattagatcaaagaatatgtgacaaagtcctagttgtatactgagaattgacgaaacaatgtttcttacatatttttttcttattagtaactgacttaatagtaggaactggaaagctagacttgattattctataagtatagatacccttccagataatgttctctttgataaaagttccagaaaatgtagaattttttaaaaagttatcttttgctattaccaagattgtgtttagacgcttattattaatatgagtgatgaaatccacaccgcctctagatatcgcctttatttccacattagatggtaaatccaatagtgaaactatctttttaggaatgtatggactcgcgtttagaggagtgaacgtcttgggcgtcggaaaggatgattcgtcaaacgaataaacaatttcacaaatggatgttaatgtattagtaggaaattttttgacgctagtggaattgaagattctaatggatgatgttctacctatttcatccgataacatgttaatttccgacaccaacggttttaatatttcgatgatatacggtagtctctctttcggacttatatagcttattccacaatacgagtcattatatactccaaaaaacaaaataactagtataaaatctgtatcgaatgggaaaaacgaaattatcgacataggtatagaatccggaacattgaacgtattaatacttaattctttttctgtggtaagtaccgataggttattgacattgtatggttttaaatattctataacttgagacttgatagatattagtgatgaattgaaaattatttttatcaccacgtgtgtttcaggatcatcgtcgacgcccgtcaaccaaccgaatggagtaaaataaatatcattaatatatgctctagatattagtatttttattaatcctttgattatcatcttctcgtaggcgaatgattccatgatcaagagtgatttgagaacatcctccggagtattaatgggcttagtaaacagtccatcgttgcaataataaaagttatccaagttaaaggatattatgcattcgtttaaagatatcacctcatctgacggagacaattttttggtaggttttagagactttgaagctacttgtttaacaaagttattcatcgtcgtctactattctatttaattttgtagttaatttatcacatatcacattaattgactttttggtccatttttccatacgtttatattcttttaatcctgcgttatccgtttccgttatatccagggatagatcttgcaagttaaatagaatgctcttaaataatgtcattttcttatccgctaaaaatttaaagaatgtataaacctttttcagagatttgaaactcttaggtggtgtcctagtacacaatatcataaacaaactaataaacattccacattcagattccaacagctgattaacttccacattaatacagcctattttcgctccaaatgtacattcgaaaaatctgaataaaacatcgatgtcacaatttgtattatccaatacagaatgtttgtgattcgtgttaaaaccatcggagaaggaatagaaataaaaattattatagtggtggaattcagttggaatattgcctccggagtcataaaaggatactaaacattgttttttatcataaattacacatttccaatgagacaaataacaaaatccaaacattacaaatctagaggtagaacttttaattttgtctttaagtatatacgataagatatgtttattcataaacgcgtcaaatttttcatgaatcgctaaggagtttaagaatctcatgtcaaattgtcctatataatccacttcggatccataagcaaactgagagactaagttcttaatacttcgattgctcatccaggctcctctctcaggctctattttcatcttgacgacctttggattttcaccagtatgtattcctttacgtgataaatcatcgattttcaaatccatttgtgagaagtctatcgccttagatactttttcccgtagtcgaggtttaaaaaaatacgctaacggtatactagtaggtaactcaaagacatcatatatagaatggtaacgcgtctttaactcgtcggttaactctttcttttgatcgagttcgtcgctactattgggtctgctcaggtgccccgactctactagttccaacatcataccgataggaatacaagacactttgccggcggttgtagatttatcatatttttccactacatatccgttacaatttgttaaaaatttagatacatctatattgctacataatccagctagtgaatatatatgacataataaattggtaaatcctagttctggtattttactaattactaaatctgtatatctttccatttatcatggaaaagaatttaccagatatcttcttttttccaaactgcgttaatgtattctcttacaaatattcacaagatgaattcagtaatatgagtaaaacggaacgtgatagtttctcattggccgtgtttccagttataaaacatagatggcataacgcacacgttgtaaaacataaaggaatatacaaagttagtacagaagcacgtggaaaaaaagtatctcctccatcactaggaaaacccgcacacataaacctaaccgcgaagcaatatatatacagtgaacacacaataagctttgaatgttatagttttctaaaatgtataacaaatacagaaatcaattcgttcgatgagtatatattaagaggactattagaagctggtaatagtttacagatattttccaattccgtaggtaaacgaacagatactataggtgtactagggaataagtatccatttagcaaaattccattggcctcattaactcctaaagcacaacgagagatattttcagcgtggatttctcatagacctgtagttttaactggaggaactggagtgggtaagacgtcacaggtacccaagttattgctttggtttaattatttatttggtggattctctactctagataaaatcactgactttcacgaaagaccagtcattctatctcttcctaggatagctttagttagattgcatagcaataccattttaaaatcattgggatttaaggtactagatggatctcctatttctttacggtacggatctataccggaagaattaataaacaaacaaccaaaaaaatatggaattgtattttctacccataagttatctctaacaaaactatttagttatggcactcttattatagacgaagttcatgagcatgatcaaataggagatattattatagcagtagcgagaaagcatcatacgaaaatagattctatgtttttaatgactgccacgttagaggatgacagggaacggctaaaagtatttttacctaatcccgcatttatacatattcctggagatacactgtttaaaattagcgaggtatttattcataataagataaatccatcttccagaatggcatacatagaagaagaaaagagaaatttagttactgctatacagatgtatactcctcctgatggatcatccggtatagtctttgtggcatccgttgcacagtgtcacgaatataaatcatatttagaaaaaagattaccgtatgatatgtatattattcatggtaaggtcttagatatagacgaaatattagaaaaagtgtattcatcacctaatgtatcgataattatttctactccttatttggaatccagcgttactatacgcaatgttacacacatttatgatatgggtagagtttttgtccccgctccttttggaggatcgcaacaatttatttctaaatctatgagagatcaacgaaaaggaagagtaggaagagttaatcctggtacatacgtctatttctatgatctgtcttatatgaagtctatacagcgaatagattcagaatttctacataattatatattgtacgctaataagtttaatctaacactccccgaagatttgtttataatccctacaaatttggatattctatggcgtacaaaggaatatatagactcgttcgatattagtacagaaacatggaataaattattatccaattattatatgaagatgatagagtatgctaaactttatgtactaagtcctattctcgctgaggagttggataactttgagaggacgggagaattaactagtattgtacgagaagccattttatctctaaatttacgaattaagattttaaattttaaacataaagatgatgatacgtatatacacttttgtaaaatattattcggtgtctataacggaacaaacgctactatatattatcatagacctctaacgggatatatgaatatgatttcagatactatatttgttcctgtagataataactaaaaatcaaactctaatgaccacatctttttttagagatgaaaaattttccacatctccttttgtagacacgactaaacattttgcagaaaaaagtttattagtgtttagataatcgtatacttcatcagtgtagatagtaaatgtgaacagataaaaggtattcttgctcaatagattggtaaattccatagaatatattaatcctttcttcttgagatcccacatcatttcaaccagagacgttttatccaatgatttacctcgtactataccacatacaaaactagattttgcagtgacgtcgtacctggtattcttaccaaacaaaattttacttttagttcttttagaaaattctaaggtagaatctctatttgccaatatgtcatctatggaattaccactagcaaaaaatgatagaaatatatattgatacatcgcagctggttttgatctactatactttaaaaacgaatcagattccataattgcctgtatatcatcagctgaaaaactatgttttacacgtattccttcggcatttctttttaatgatatatcttgtttagacaatgataaagttatcatgtccatgagagacgcgtctccgtatcgtataaatatttcattagatgttagacgcttcattaggggtatacttctataaggtttcttaatcagtccatcattggttgcgtcaagaactactatcggatgttgttgggtatctctagtgttacacatggccttactaaagtttgggtaaataactatgatatctctattaattatagatgcatatatttcatttgtcaaggatattagtatcgacttgctatcgtcattaatacgtgtaatgtaatcatataaatcatgcgatagccaaggaaaatttaaatagatgttcatcatataatcgtcgctataattcatattaatacgttgacattgactaatttgtaatatagcctcgccacgaagaaagctctcgtattcagtttcatcgataaaggataccgttaaatataactggttgccgatagtctcatagtctattaagtggtaagtttcgtacaaatacagaatccctaaaatattatctaatgttggattaatctttaccataactgtataaaatggagacggagtcataactattttaccgtttgtacttactggaatagatgaaggaataatctccggacatgctggtaaagacccaaatgtctgtttgaagaaatccaatgttccaggtcctaatctcttaacaaaaattacgatattcgatcccgatatcctttgcattctatttaccagcatatcacgaactatattaagattatctatcatgtctattctcccaccgttatataaatcgcctccgctaagaaacgttagtatatccatacaatggaatacttcatttctaaaatagtattcgttttctaattctttaatgtgaaatcgtatactagaaagggaaaaattatctttgagttttccgttagaaaagaaccacgaaactaatgttctgattgcgtccgattccgttgctgaattaatggatttacaccaaaaactcatataacttctagatgtagaagcattcgctaaaaaattagtagaatcaaaggatataagtagatgttccaacaagtgagcaattcccaagatttcatctatatcattctcgaatccgaaattagaaattcccaagtagatatcctttttcatccgatcgttgatgaaaatacgaactttattcggtaagacaatcatttactaaggagtaaaataggaagtaatgttcgtatgtcgttatcatcgtataaattaaaggtgtgttttttaccattaagtgacattataattttaccaatattggaattataatataggtgtatttgcgcactcgcgacggttgatgcatcggtaaatatagctgtatctaatgttctagtcggtatttcatcatttcgctgtctaataatagcgttttctctatctgtttccattacagctgcctgaagtttattggtcggataatatgtaaaataataagaaatacatacgaataacaaaaataaaataagatataataaagatgccatttagagatctaattttgtttaacttgtccaaattcctacttacagaagatgaggaatcgttggagatagtgtcttccttatgtagaggatttgaaatatcttataatgacttgataacttactttccagataggaaataccataaatatatttataaagtatttgaacatgtagatttatcggaggaattaagtatggaattccatgatacaactctgagagatttagtctatcttagattgtacaagtattccaagtgtatacggccgtgttataaattaggagataatctaaaaggcatagttgttataaaggacaggaatatttatattagggaagcaaatgatgacttgatagaatatctcctcaaggaatacactcctcagatttatacatattctaatgagcgcgtccccataactggttcaaaattaattctttgtggattttctcaagttacatttatggcgtatacaacgtcgcatataacaacaaataaaaaggtagatgttctcgtttccaaaaaatgtatagatgaactagtcgatccaataaattatcaaatacttcaaaatttatttgataaaggaagcggaacaataaacaaaatactcaggaagatattttattcggtaacaggtggccaaactccataggtagctttttctatttcggattttagaatttccaaattcaccagcgatttatcggttttggtgaaatccaaggatttattaatgtccacaaatgccatttgttttgtctgtggattgtatttgaaaatggaaacgatgtagttagatagatgcgctgcgaagtttcctattagggttccgcgcttcacgtcacccagcatacttgaatcaccatcctttaaaaaaaatgataagatatcaacatggagtatatcatactcggattttaattcttctactgcatcactgacattttcacaaatactacaatacggtttaccgaaaataatcagtacgttcttcatttatgggtatcaaaaacttaaaatcgttactgctggaaaataaatcactgacgatattagatgataatttatacaaagtatacaatggaatatttgtggatacaatgagtatttatatagccgtcgccaattgtgtcagaaacttagaagagttaactacggtattcataaaatacgtaaacggatgggtaaaaaagggagggcatgtaaccctttttatcgatagaggaagtataaaaattaaacaagacgttagagacaagagacgtaaatattctaaattaaccaaggacagaaaaatgttagaattagaaaagtgtacatccgaaatacaaaatgttaccggatttatggaagaagaaataaaggcagaaatgcaattaaaaatcgataaactcacatttcaaatatatttatctgattctgataacataaaaatatcattgaatgagatactaacacatttcaacaataatgagaatgttacattattttattgtgatgaacgagacgcagaattcgttatgtgtctcgaggctaaaacacatttctctaccacaggagaatggccgttgataataagtaccgatcaggatactatgctatttgcatctgctgataatcatcctaagatgataaaaaacttaactcaactgtttaaatttgttccctcggcagaggataactatttagcaaaattaacggcgttagtgaatggatgtgatttctttcctggactctatggggcatctataacacccaccaacttaaacaaaatacaattgtttagtgattttacaatcgataatatagtcactagtttggcaattaaaaattattatagaaagactaactctaccgtagacgtgcgtaatattgttacgtttataaacgattacgctaatttagacgatgtctactcgtatattcctccttgtcaatgcactgttcaagaatttatattttccgcattagatgaaaaatggaatgaatttaaatcatcttatttagaaagcgtgccgttaccctgccaattaatgtacgcgttagaaccacgcaaggagattgatgtttcagaagttaaaactttatcatcttatatagatttcgaaaatactaaatcagatatcgatgttataaaatctatatcctcgatcttcggatattctaacgaaaactgtaacacgatagtattcggcatctataaggataatttactactgagtataaataattcattttactttaacgatagtctgttaataaccaatactaaaagtgataatataataaatataggttactagattaaaaatggtgttccaactcgtgtgctctacatgcggtaaagatatttctcacgaacgatataaattgattatacgaaaaaaatcattaaaggatgtactcgtcagtgtaaagaacgaatgttgtaggttaaaattatctacacaaatagaacctcaacgtaacttaacagtgcaacctctattggatataaactaatatggatccggttaattttatcaagacatatgcgcctagaggttctattatttttattaattataccatgtcattaacaagtcatttgaatccatcgatagaaaaacatgtgggtatttattatggtacgttattatcggaacacttggtagttgaatcaacatatagaaaaggagttcgaatagtcccattggatagtttttttgaaggatatcttagtgcaaaagtatacatgttagagaatattcaagttatgaaaatagcagctgatacgtcattaactttattgggtattccgtatggatttggtcataatagaatgtattgttttaaattggtagctgactgttataaaaatgccggtattgatacatcgtctaaacgaatattgggcaaagatatttttctgagccaaaacttcacagacgataatagatggataaagatatatgattctaataatttaacattttggcaaattgattaccttaaagggtgagttaatatgcataactactcctccgttgttttttccctcgttctttttcttaacgttgtttgccatcactctcataatgtaaagatattctaaaatggtaaacttttgcatatcggacgcagaaattggtataaatgttgtaattgtattatttcccgtcaatggactagtcacagctccatcagttttatatcctttagagtatttctcactcgtgtctaacattctagagcattccatgatctgtttatcgttgatattggccggaaagatagattttttattttttattatattactattggcaattgtagatataacttctggtaaatatttttctaccttttcaatctcttctattttcaagccggctatatattctgctatattgttgctagtatcaataccttttctggctaagaagtcatatgtggtattcactatatcagttttaactggtagttccattagcctttccacttctgcagaataatcagaaattggttctttaccagaaaatccagctactataataggctcaccgatgatcattggcaaaatcctatattgtaccagattaatgagagcatatttcatttccaataattctgctagttcttgagacattgatttatttgatgaatctagttggttctctagatactctaccatttctgccgcatacaataacttgttagataaaatcagggttatcaaagtgtttagcgtggctagaatagtgggcttgcatgtattaaagaatgcggtagtatgagtaaaccgttttaacgaattatatagtctccagaaatctgtggcgttacatacatgagccgaatgacatcgaagattgtccaatatttttaatagctgctctttgtccattatttctatatttgactcgcaacaattgtagataccattaatcaccgattcctttttcgatgccggacaatagcacaattgtttagctttggactctatgtattcagaattaatagatatatctctcaatacagattgcactatacattttgaaactatgtcaaaaattgtagaacgacgctgttctgcagccatttaactttaaataatttacaaaaatttaaaatgagcatccgtataaaaatcgataaactgcgccaaattgtggcatatttttcagagttcagtgaagaagtgtctataaatgtagactcgacggatgagttaatgtatatttttgccgccttgggcggatctgtaaacatttgggcaattatacctctaagtgcatcagtgttttaccgaggagccgaaaatattgtgtttaatcttcctgtgtccaaggtaaaatcgtgtttgtgtagttttcacaatgatgccatcatagatatagaacctgatctggaaaataatctagtaaaactttctagttatcatgtagtaagtgtcgattgtaacaaggaactgatgcctattaggacagatactactatttgtctaagtatagatcaaaagaaatcttacgtgtttaattttcacaagtatgaagaaaaatgttgtggtagaaccgtcattcatctagaatggttgttgggctttatcaagtgtattagtcagcatcagcatctggctattatgtttaaagatgacaatattattatgaagactcctggtaatactgatgcgttttccagggaatattctatgactgaatgttctcaagaactacaaaagttttctttcaaaatagctatctcgtctctcaacaaactacgaggattcaaaaagagagtcaatgtttttgaaactagaatcgtaatggataatgacgataacattttaggaatgttgttttcggatagagttcaatcctttaagatcaacatctttatggcgtttttagattaatactttcaatgagataaatatgggtggcggagtaagtgttgagctccctaaacgggatccgcctccgggagtacccactgatgagatgttattaaacgtggataaaatgcatgacgtgatagctcccgctaagcttttagaatatgtgcatataggaccactagcaaaagataaagaggataaagtaaagaaaagatatccagagtttagattagtcaacacaggacccggtggtctttcggcattgttaagacaatcgtataatggaaccgcacccaattgctgtcgcacttttaatcgtactcattattggaagaaggatggaaagatatcagataagtatgaagagggtgcagtattagaatcgtgttggccagacgttcacgacactggaaaatgcgatgttgatttattcgactggtgtcagggggatacgttcgatagaaacatatgccatcagtggatcggttcagcctttaataggagtaatagaactgtagagggtcaacaatcgttaataaatctgtataataagatgcaaacattatgtagtaaagatgctagtgtaccaatatgcgaatcatttttgcattatttacgcgcacacaatacagaagatagcaaagagatgatcgattatattctaagacaacagtctgcggactttaaacagaaatatatgagatgtagttatcccactagagataagttagaagagtcattaaaatatgcggaacctcgagaatgttgggatccagagtgttcgaatgccaatgttaatttcttactaacacgtaattataataatttaggactttgcaatattgtacgatgtaataccagcgtgaacaacttacagatggataaaacttcctcattaagattgtcatgtggattaagcaatagtgatagattttctactgttcccgtcaatagagcaaaagtagttcaacataatattaaacactcgttcgacctaaaattgcatttgatcagtttattatctctcttggtaatatggatactaattgtagctatttaaatgggtgccgcggcaagcatacagacgacggtgaatacactcagcgaacgtatctcgtctaaattagaacaagaagcgaatgctagtgctcaaacaaaatgtgatatagaaatcggaaatttttatatccgacaaaaccatggatgtaacctcactgttaaaaatatgtgctctgcggacgcggatgctcagttggatgctgtgttatcagccgctacagaaacatatagtggattaacaccggaacaaaaagcatacgtgccagctatgtttactgctgcgttaaacattcagacgagtgtaaacactgttgttagagattttgaaaattatgtgaaacagacttgtaattctagcgcggtcgtcgataacaaattaaagatacaaaacgtaatcatagatgaatgttacggagccccaggatctccaacaaatttggaatttattaatacaggatctagcaaaggaaattgtgccattaaagcgttgatgcaattgacgactaaggccactactcaaatagcacctagacaagttgctggtacaggagttcagttttatatgattgttatcggtgttataatattggcagcgttgtttatgtactatgccaagcgtatgctgttcacatccaccaatgataaaatcaaacttattttagccaataaggaaaacgtccattggactacttacatggacacattctttagaacttctccgatggttattgctaccacggatatgcaaaactgaaaatatattgataatattttaatagattaacatggaagttatcgctgatcgtctagacgatatagtgaaacaaaatatagcggatgaaaaatttgtagattttgttatacacggtctagagcatcaatgtcctgctatacttcgaccattaattaggttgtttattgatatactattatttgttatagtaatttatatttttacggtacgtctagtaagtagaaattatcaaatgttgttggtggtgctagtcatcacattaactattttttattactttatactataatagtactagactgacttctaacaaacatctcacctgccataaataaatgcttgatattaaagtcttctatttctaacactattccatctgtggaaaataatactctgacattatcgctaattgacacatcggtgagtgatatgcctataaagtaataatcttctttgggcacatataccagtgtaccaggttctaacaacctatttactggtgctcctgtagcatactttttctttaccttgagaatatccatcgtttgcttggtcaatagcgatatgtgattttttatcaaccactcgaaaaagtaattggagtgttcatatcctctacgggctattgtctcatggccgtgtatgaaatttaagtaacacgactgtggtagatttgttctatagagccggttgccgcaaatagatagaactaccaatatgtctgtacaaatgttaaacattaattgattaacagaaaaaacaatgttcgttctgggaatagaaaccagatcaaaacaaaattcgttagaatatatgccacgtttatacatggaatataaaataactacagtttgaaaaataacagtatcatttaaacatttaacttgcggggttaatctcacaactttactgtttttgaactgttcaaaatatagcatcgatccgtgagaaatacgtttagccgcctttaatagaggaaatcccaccgcctttctggatctcaccaacgacgatagttctgaccagcaactcatttcttcatcatccacctgttttaacatataataggcaggagatagatatccgtcattgcaatattccttctcgtaggcacacaatctaatattgataaaatctccattctcttctctgcatttattatcttgtctcggtggctgattaggctgtggtcttggtttaggccttggtctatcgttgttgaatctattttggtcattaaatctttcatttcttcctggtatatttctatcacctcgtttggttggatttttgtctatattatcgtttgtaacatcggtacgggtattcatttatcacaaaaaaaacttctctaaatgagtctactgctagaaaacctcatcgaagaagataccatattttttgcaggaagtatatctgagtatgatgatttacaaatggttattgccggcgcaaaatccaaatttccaagatctatgctttctatttttaatatagtacctagaacgatgtcaaaatatgagttggagttgattcataacgaaaatatcacaggagcaatgtttaccacaatgtataatataagaaacaatttgggtctaggagatgataaactaactattgaagccattgaaaactatttcttggatcctaacaatgaagttatgcctcttattattaataatacggatatgactgccgtcattcctaaaaaaagtggtaggagaaagaataagaacatggttatcttccgtcaaggatcatcacctatcttgtgcattttcgaaactcgtaaaaagattaatatttataaagaaaatatggaatccgcgtcgactgagtatacacctatcggagacaacaaggctttgatatctaaatatgcgggaattaatgtcctgaatgtgtattctccttccacatccataagattgaatgccatttacggattcaccaataaaaataaactagagaaacttagtactaataaggaactagaatcgtatagttctagccctcttcaagaacccattaggttaaatgattttctgggactattggaatgtgttaaaaagaatattcctctaacagatattccgacaaaggattgattactataaatggagaatgttcctaatgtatactttaatcctgtgtttatagagcccacgtttaaacattctttattaagtgtttataaacacagattaatagttttatttgaagtattcattgtattcattctaatatatgtattttttagatctgaattaaatatgttcttcatgcctaaacgaaaaatacccgatcctattgatagattacgacgtgctaatctagcgtgtgaagacgataaattaatgatctatggattaccatggatgacaactcaaacatctgcgttatcaataaatagtaaaccgatagtgtataaagattgtgcaaagcttttgcgatcaataaatggatcacaaccagtatctcttaacgatgttcttcgcagatgatgattcattttttaagtatttggctagtcaagatgatgaatcttcattatctgatatattgcaaatcactcaatatctagactttctgttattattattgatccaatcaaaaaataaattagaagctgtgggtcattgttatgaatctctttcagaggaatacagacaattgacaaaattcacagactttcaagattttaaaaaactgtttaacaaggtccctattgttacagatggaagggtcaaacttaataaaggatatttgttcgactttgtgattagtttgatgcgattcaaaaaagaatcctctctagctaccaccgcaatagatcctgttagatacatagatcctcgtcgtgatatcgcattttctaacgtgatggatatattaaagtcgaataaagtgaacaataattaattctttattgtcatcatgaacggcggacatattcagttgataatcggccccatgttttcaggtaaaagtacagaattaattagacgagttagacgttatcaaatagctcaatataaatgcgtgactataaaatattctaacgataatagatacggaacgggactatggacgcatgataagaataattttgaagcattggaagcaactaaactatgtgatgtcttggaatcaattacagatttctccgtgataggtatcgatgaaggacagttctttccagacattgtttaattctgtgagcgtatggcaaacgaaggaaaaatagttatagtagccgcactcgatgggacatttcaacgtaaaccgtttaataatattttgaatcttattccattatctgaaatggtggtaaaactaactgctgtgtgtatgaaatgctttaaggaggcttccttttctaaacgattgggtgaggaaaccgagatagagataataggaggtaatgatatgtatcaatcggtgtgtagaaagtgttacgtcggctcataatattatattttttatctaaaaaactaaaaataaacattgattaaattttaatataatacttaaaaatggatgttgtgtcgttagataaaccgtttatgtattttgaggaaattgataatgagttagattacgaaccagaaagtgcaaatgaggtcgcaaaaaaactgccgtatcaaggacagttaaaactattactaggagaattattttttcttagtaagttacagcgacacggtatattagatggtgccaccgtagtgtatataggatcggctcctggtacacatatacgttatttgagagatcatttctataatttaggagtgatcatcaaatggatgctaattgacggccgccatcatgatcctattctaaatggattgcgtgatgtgactctagtgactcggttcgttgatgaggaatatctacgatccatcaaaaaacaactgcatccttctaagattattttaatttctgatgtgagatccaaacgaggaggaaatgaacctagtacggcggatttactaagtaattacgctctacaaaatgtcatgattagtattttaaaccccgtggcgtctagtcttaaatggagatgcccgtttccagatcaatggatcaaggacttttatatcccacacggtaataaaatgttacaaccttttgctccttcatattcagctgaaatgagattattaagtatttataccggtgagaacatgagactgactcgagttaccaaattagacgctgtaaattatgaaaaaaagatgtactaccttaataagatcgtccgtaacaaagtagttgttaactttgattatcctaatcaggaatatgactattttcacatgtactttatgctgaggaccgtgtactgcaataaaacatttcctactactaaagcaaaggtactatttctacaacaatctatatttcgtttcttaaatattccaacaacatcaactgaaaaagttagtcatgaaccaatacaacgtaaaatatctagcaaaaattctatgtctaaaaacagaaatagcaagagatccgtacgcggtaataaatagaaacgtactactgagatatactaccgatatagagtataatgatttagttactttaataaccgttagacataaaattgattctatgaaaactgtgtttcaggtatttaacgaatcatccataaattatactccggttgatgatgattatggagaaccaatcattataacatcgtatcttcaaaaaggtcataacaagtttcctgtaaattttctatacatagatgtggtaatatctgacttatttcctagctttgttagactagatactacagaaactaatatagttaatagtgtactacaaacaggcgatggtaaaaagactcttcgtcttcccaaaatgttagagacggaaatagttgtcaagattctctatcgccctaatataccattaaaaattgttagatttttccgcaataacatggtaactggagtagagatagccgatagatctgttatttcagtcgctgattaatcaattagtagagatgagataagaacattataataatcaataatatatcttatatcttatatcttatatcttatatcttgtttagaaaaatgctaatattaaaatagctaacgctagtaatccaatcggaagccatttgatatctataatagggtatctaatttcctgatttaaatagcggacagctatattctcggtagctactcgtttggaatcacaaacattatttacatctaatttactatctgtaatggaaacgtttcccaatgaaatggtacaatccgatacattgcattttgttatatttttttttaaagaggctggtaacaacgcatcgcttcgtttacatggctcgtaccaacaataatagggtaatcttgtatctattcctatccgtactatgcttttatcaggataaatacatttacatcgtatatcgtctttgttagcatcacagaatgcataaatttgttcgtccgtcatgataaaaatttaaagtgtaaatataactattatttttatagttgtaataaaaagggaaatttgattgtatactttcggttctttaaaagaaactgacttgataaaaatggctgtaatctctaaggttacgtatagtctatatgatcaaaaagagattaatgctacagatattatcattagtcatgttaaaaatgacgacgatatcggtaccgttaaagatggtagactaggtgctatggatggggcattatgtaaaacttgtgggaaaacggaattggaatgtttcggtcactggggtaaagtaagtatttataaaactcatatagttaagcctgaatttatttcagaaattattcgtttactgaatcatatatgtattcactgcggattattgcgttcacgagaaccgtattccgacgatattaacctaaaagagttatcgggacacgctcttaggagattaaaggataaaatattatccaagaaaaagtcatgttggaacagtgaatgtatgcaaccgtatcaaaaaattactttttcaaagaaaaaggtttgtttcgtcaacaagttggatgatattaacgttcctaattctctcatctatcaaaagttaatttctattcatgaaaagttttggccattattagaaattcatcaatatccagctaacttattttatacagactactttcccatccctccgttgattattagaccggctattagtttttggatagatagtatacccaaagagaccaatgaattaacttacttattaggtatgatcgttaagaattgtaacttgaatgctgatgaacaggttatccagaaggcggtaatagaatacgatgatattaaaattatttctaataacactaccagtatcaatttatcatatattacatccggcaaaaataatatgattagaagttatatcgtcgcccgacgaaaagatcagaccgctagatctgtaattggtcccagtacatctatcaccgttaatgaggtaggaatgcccgcatatattagaaatacacttacagaaaagatatttgttaatgcctttacagtggataaagttaaacaactattagcgtcaaaccaagttaaattttactttaataaacgattaaaccaattaacaagaatacgccaaggaaagtttattaaaaataaaatacatttattgcctggtgattgggtagaagtagctgttcaagaatatacaagtattatttttggaagacagccgtctctacatagatacaacgtcatcgcttcatctatcagagctaccgaaggagatactatcaaaatatctcccggaattgccaactctcaaaatgctgatttcgacggggatgaggaatggatgatattagaacaaaatcctaaagctgtaattgaacaaagtattcttatgtatccgacgacgttactcaaacacgatattcatggagcccccgtttatggatctattcaagatgaaatcgtagcagcgtattcattgtttaggatacaagatctttgtttagatgaagtattgaacatcttggggaaatatggaagagagttcgatcctaaaggtaaatgtaaattcagcggtaaagatatctatacttacttgataggtgaaaagattaattatccgggtctcttaaaggatggtgaaattattgcaaacgacgtagatagtaattttgttgtggctatgaggcatctgtcattggctggactcttatccgatcataagtcgaacgtggaaggtatcaactttattatcaagtcatcttatgtttttaagagatatctatctatttacggttttggggtgacattcaaagatctgagaccaaattcgacgttcactaataaattggaggccatcaacgtagaaaaaatagaacttatcaaagaagcatacgccaaatatctcaacgatgtaagagacgggaaaatagttccattatctaaagctttagaggcggactatgtggaatccatgttatccaacttgacaaatcttaatatccgagagatagaagaacatatgagacaaacgctgatagatgatccagataataacctcctgaaaatggccaaagcgggttataaagtaaatcccacagaactaatgtatattctaggtacgtatggacaacaaaggattgatggtgaaccagcagagactcgagtattgggtagagttttaccttactatcttccagactctaaggatccagaaggaagaggttatattcttaattctttaacaaaaggattaacgggttctcaatattacttttcgatgctggttgcaagatctcaatctactgatatcgtctgtgaaacatcacgtaccggaacactggctagaaaaatcattaaaaagatggaggatatggtggtcgacggatacggacaagtagttataggtaatacgctcatcaagtacgccgccaattataccaaaattctaggctcagtatgtaaacctgtagatcttatctatccagatgagtccatgacttggtatttggaaattagtgctctgtggaataaaataaaacagggattcgtttactctcagaaacagaaacttgcaaagaagacattggcgccgtttaatttcctagtattcgtcaaacccaccactgaggataatgctattaaggttaaggatctgtacgatatgattcataacgtcattgatgatgtgagagagaaatacttctttacggtatctaatatagattttatggagtatatattcttgacgcatcttaatccttctagaattagaattacaaaagaaacggctatcactatctttgaaaagttctatgaaaaactcaattatactctaggtggtggaactcctattggaattatttctgcacaggtattgtctgagaagtttacacaacaagccctgtccagttttcacactactgaaaaaagtggtgccgtcaaacaaaaacttggtttcaacgagtttaataacttgactaatttgagtaagaataagaccgaaattatcactctggtatccgatgatatctctaaacttcaatctgttaagattaatttcgaatttgtatgtttgggagaattaaatccagacatcactcttcgaaaagaaacagataggtatgtagtagatataatagtcaatagattatacatcaagagagcagaaataaccgaattagtcgtcgaatatatgattgaacgatttatctcctttagcgtcattgtaaaggaatggggtatggaaacattcattgaggatgaggataatattagatttactgtctacctaaatttcgttgaaccggaagaattgaatcttagtaagtttatgatggttcttccgggtgccgccaacaagggaaagattagtaaattcaagattcctatctctgactatacgggttatgacgacttcaatcaaacaaaaaagctcaataagatgactgtagaactcatgaatctaaaagaattgggttctttcgatttggaaaacgtcaacgtgtatcctggagtatggaatacatacgatatcttcggtatcgaggccgctcgtgaatacttgtgcgaagccatgttaaacacctatggagaagggttcgattatctgtatcagccttgtgatcttctcgctagtttactatgtgctagttacgaaccagaatcagtgaataaattcaagttcggcgcagctagtactcttaagagagctacgttcggagacaataaagcattgttaaacgcggctcttcataaaaagtcagaacctattaacgataatagtagctgccacttttttagcaaggtccctaatataggaactggatattacaaatactttatcgacttgggtcttctcatgagaatggaaaggaaactatctgataagatatcttctcaaaagatcaaggaaatggaagaaacagaagacttttaattcttatcaataacatatttttctatgatctgtcttttaaacgatggattttccacaaatgcgcctctcaagtccctcatagaatgatacacgtataaaaaatatagcataggcgatgactccttatttttagacattagatatgccaaaatcatagccccgcttctatttactcccgcagcacaatgaaccaacacgggctcgtttcgttgatcacatttagataaaaaggcggttacgtcgtcaaaatatttactaatatcggtagttgtatcatctaccaacggtatatgaataatattaatattagagttaggtaatgtatatttatccatcgtcaaatttaaaacatatttgaacttaacttcagatgatggtgcatccatagcatttttataatttcccaaatacacattattggttacccttgtcattatagtgggagatttggctctgtgcatatctccagttgaacgtagtagtaagtatttatacaaacttttcttatccatttataacgtacaaatggataaaactactttatcggtaaacgcgtgtaatttagaatacgttagagaaaaggctatagtaggcgtacaagcagccaaaacatcaacacttatattctttgttattatattggcaattagtgcgctattactctggtttcagacgtctgataatccagtctttaatgaattaacgagatatatgcgaattaaaaatacggttaacgattggaaatcattaacggatagcaaaacaaaattagaaagtgatagaggtaaacttctagccgctggtaaggatgatatattcgaattcaaatgtgtggatttcggcgcctattttatagctatgcgattggataagaaaacatatctgccgcaagctattaggcgaggtactggagacgcgtggatggttaaaaaggcggcaaaggtcgatccatctgctcaacaattttgtcagtatttgataaaacacaagtctaataatgttattacttgtggtaatgagatgttaaatgaattaggttatagcggttattttatgtcaccgcattggtgttccgattttagtaatatggaatagtgttagataaatgcggtaacgaatgttcctgtaaggaaccataacagtttagatttaacgttaaagatgagcataaacataataaacaaaattacaatcaaacttataacattaatatcaaacaatccaaaaaatgaaatcagtggagtagtaaacgcgtacataactcctggataacgtttagcagctgccgttcctattctagaccaaaaatttggtttcatgttttcgaaacggtattctgcaacaagtcggggatcgtgttctacatatttggcggcattatccagtatctgcctattgatcttcatttcgttttcgattctggctatttcaaaataaaatcccgatgatagacctccagactttataatttcatctacgatgttcagcgccgtagtaactctaataatataggctgataagctaacatcataccctcctgtatatgtgaatatggcatgatttttgtccattacaagctcggttttaactttattgcctgtaataatttctctcatctgtaggatatctatttttttgtcatgcattgccttcaagacgggacgaagaaacgtaatatcctcaataacgttatcgttttctacaataactacatattctacctttttattttctaactcggtaaaaaaattagaatcccatagggctaaatgtctagcgatatttcttttcgtttcttctgtacacatagtgttacaaaaccctgaaaagaagtgagtatacttgtcatcatttctaatgtttcctccagtccactgtataaacgcataatccttgtaatgatctggatcatccttgactaccacaacatttcttttttctggcataacttcgttgtcctttacatcatcgaacttctgatcattaatatgctcatgaacattaggaaatgtttctgatggaggtctatcaataactggcacaacaataacaggagttttcaccgccgccatttagttattgaaattaatcatatacaactctttaatacgagttatattttcgtctatccattgtttcacattgacatatttcgacaaaaagatataaaatgcgtattccaatgcttctctgtttaatgaattactaaaatatacaaacacgtcactgtctggcaataaatgatatcttagaatattgtaacaatttattttgtattgcacatgttcgtgatctatgagttcttcttcgaatggcataggatctccgaatctgaaaacgtataaataggagttagaataataatatttgagagtattggtaatatataaactctttagcggtataattagtttttttctctcaatttctatttttagatgtgatggaaaaatgactaattttgtagcattagtatcatgaactctaatcaaaatcttaatatcttcgtcacacgttagctctttgaagtttttaagagatgcatcagttggttctacagatggagtaggtgcaacaattttttgttctacacatgtatgtactggagccattgttttaactataatggtgcttgtatcgaaaaactttaatgcagatagcggaagctcttcgccgcgactttctacgtcgtaattgggttctaacgccgatctctgaatggatactagttttctaagttctaatgtgattctctgaaaatgtaaatccaattcctccggcattatagatgtgtatacatcggtaaataaaactatagtatccaacgatcccttctcgcaaattctagtcttaaccaaaaaatcgtatataaccacggagatggcgtatttaagagtggattcttctaccgttttgttcttggatgtcatataggaaactataaagtccgcactactgttaagaatgattactaacgcaactatatagtttaaattaagcattttggaaacataaaataactctgtagacgatacttgactttcgaataagtttgcagacaaacgaagaaagaacagacctctcttaatttcagaagaaaactttttttcgtattcctgacgtctagagtttatatcaataagaaagttaagaattagtcggttaatgttgtatttcattacccaagtttgagatttcataatattatcaaaagacatgataatattaaagataaagcgctgactatgaacgaaatagctatatggttcgctcaagaatatagtcttgttaaacgtggaaacgataactgtatttttaatcacgtcagcggcatctaaattaaatataggtatatttattccacacactctacaatatgccacaccatcttcataataaataaattcgttagcaaaattattaattttagtgaaatagttagcgtcaactttcatagcttccttcaatctaatttgatgctcacacggtgcgaattccactctaacatcccttttccatgcctcaggttcatcgatctctataatatctagttttttgcgtttcacaaacacaggctcgtctctcgcgatgagatctgtatagtaactatgtaaatgataactagatagaaagatgtagctatatagatgacgatcctttaagagaggtataataactttaccccaatcagatagactgttgttatggtcttcggaaaaagaatttttataaatttttccagtattttccaaatatacgtacttaacatctaaaaaatccttaatgataataggaatggataatccgtctattttataaagaaatacatatcgcacattatacttttttttggaaatgggaataccgatgtgtctacataaatatgcaaagtctaaatattttttagagaatcttagttggtccaaattcttttccaagtacggtaatagatttttcatattgaacggtatcttcttaatctctggttctagttccgcattaaatgatgaaactaagtcactatttttataactaacgattacatcacctctaacatcatcatttaccagaatactgatcttcttttgtcgtaaatacatgtctaatgtgttaaaaaaaagatcatacaagttatacgtcatttcatctgtggtattcttgtcattgaaggataaactcgtactaatctcttctttaacagcctgttcaaatttatatcctatatacgaaaaaatagcaaccagtgtttgatcatccgcgtcaatattctgttctatcgtagtgtataacaatcgtatatcttcttctgtgatagtcgatacgttataaaggttgataacgaaaatatttttatttcgtgaaataaagtcatcgtaggattttggacttatatttgcgtctagtagatatgcttttatttttggaatgatctcaattagaatagtctctttagagtccatttaaagttacaaacaactaggaaattggtttatgatgtataatttttttagtttttatagattctttattctatacttaaaaaatgaaaataaatacaaaggttcttgagggttgtgttaaattgaaagcgagaaataatcataaattatttcattatcgcgatatccgttaagtttgtatcgtaatggcgtggtcaattacaaataaagcggatactagtagcttcacaaagatggctgaaatcagagctcatctaaaaaatagcgctgaaaataaagataaaaacgaggatattttcccggaagatgtaataattccatctactaagcccaaaaccaaacgagccactactcctcgtaaaccagcggctactaaaagatcaaccaaaaaggaggaagtggaagaagaagtagttatagaggaatatcatcaaacaactgaaaaaaattctccatctcctggagtcagcgacattgtagaaagcgtggccgctgtagagctcgatgatagcgacggggatgatgaacctatggtacaagttgaagctggtaaagtaaatcatagtgctagaagcgatctctctgacctaaaggtggctaccgacaatatcgttaaagatcttaagaaaattattactagaatctctgcagtatcgacggttctagaggatgttcaagcagctggtatctctagacaatttacttctatgactaaagctattacaacactatctgatctagtcaccgagggaaaatctaaagttgttcgtaaaaaagttaaaacttgtaagaagtaaatgcgtgcacttttttataaagatggtaaactctttaccgataataattttttaaatcctgtatcagacgataatccagcgtatgaggttttgcaacatgttaaaattcctactcatttaacagatgtagtagtatatgaacaaacgtgggaggaggcgttaactagattaatttttgtgggaagcgattcaaaaggacgtagacaatacttttacggaaaaatgcatgtacagaatcgcaacgctaaaagagatcgtatttttgttagagtatataacgttatgaaacgaattaattgttttataaacaaaaatataaagaaatcgtccacagattccaattatcagttggcggtttttatgttaatggaaactatgttttttattagatttggtaaaatgaaatatcttaaggagaatgaaacagtagggttattaacactaaaaaataaacacatagaaataagtcccgatgaaatagttatcaagtttgtaggaaaggacaaagtttcacatgaatttgttgttcataagtctaatagactatataaaccgctattgaaactgacggatgattctagtcccgaagaatttctgttcaacaaactaagtgaacgaaaggtatacgaatgtatcaaacagtttggtattagaatcaaggatctccgaacgtatggagtcaattatacgtttttatataatttttggacaaatgtaaagtccatatctcctcttccgtcaccaaaaaagttaatagcgttaactatcaaacaaactgctgaagtggtaggtcatactccatcaatttcaaaaagagcttatatggcaacgactattttagaaatggtaaaggataaaaattttttagatgtagtatctaaaactacgttcgatgaattcctatctatagtcgtagatcacgttaaatcatctacggatggatgatatagatctttacacaaataattacaagaccgataaatggaaatggataagcgtatgaaatctctcgcaatgacagctttcttcggagagctaagcacattagatattatggcattgataatgtctatatttaaacgccatccaaacaataccattttttcagtggataaggatggtcagtttatgattgatttcgaatacgataattataaggcttctcaatatttggatctgaccctcactccgatatctggagatgaatgcaagactcacgcatcgagtatagccgaacaattggcgtgtgtggatattattaaagaggatattagcgaatatatcaaaactactccccgtcttaaacgatttataaaaaaataccgcaatagatcagatactcgcatcagtcgagatacagaaaagcttaaaatagctctagctaaaggcatagattacgaatatataaaagacgcttgttaataagtaaatgaaaaaaaactagtcgtttataataaaacacgatatggatgccaacgtagtatcatcttctactattgcgacgtatatagacgctttagcgaagaatgcttcagaattagaacagaggtctaccgcatacgaaataaataatgaattggaactagtatttattaagccgccattgattactttgacaaatgtagtgaatatctctacgattcaggaatcgtttattcgatttaccgttactaataaggaaggtgttaaaattagaactaagattccattatctaaggtacatggtctagatgtaaaaaatgtacagttagtagatgctatagataacatagtttgggaaaagaaatcattagtgacggaaaatcgtcttcacaaagaatgcttgttgagactatcgacagaggaacgtcatatatttttggattacaagaaatatggatcctctatccgactagaattagtcaatcttattcaagcaaaaacaaaaaactttacgatagactttaagctaaaatattttctaggatccggtgcccaatctaaaagttctttgttgcacgctattaatcatccaaagtcaaggcctaatacatctctggaaatagaattcacacctagagacaatgaaacagttccatatgatgaactaataaaggaattgacgactctctcgcgtcatatatttatggcttctccagagaatgtaattctttctccgcctattaacgcgcctataaaaacctttatgttgcctaaacaagatatagtaggtttggatctggaaaatctatatgccgtaactaagactgacggcattcctataactatcagagttacatcaaacgggttgtattgttattttacacatcttggttatattattagatatcctgttaagagaataatagattccgaagtagtagtctttggtgaggcagttaaggataagaactggaccgtatatctcattaagctaatagagcccgtgaatgctatcagtgatagactagaagaaagtaagtatgttgaatctaaactagtggatatttgtgatcggatagtattcaagtcaaagaaatacgaaggtccgtttactacaactagtgaagtcgtcgatatgttatctacatatttaccaaagcaaccagaaggtgttattctgttctattcaaagggacctaaatctaacattgattttaaaattaaaaaggaaaatactatagaccaaactgcaaatgtagtatttaggtacatgtccagtgaaccaattatctttggagaatcgtctatctttgtagagtataagaaatttagcaacgataaaggctttcctaaagaatatggttctggtaagattgtgttatataacggcgttaattatctaaataatatctattgtttggaatatattaatacacataatgaagtgggtattaagtccgtggttgtacctattaagtttatagcagaattcttagttaatggagaaatacttaaacctagaattgataaaaccatgaaatatattaactcagaagattattatggaaatcaacataatatcatagtcgaacatttaagagatcaaagcatcaaaataggagatatctttaacgaggataaactatcggatgtgggacatcaatacgccaataatgataaatttagattaaatccagaagttagttattttacgaataaacgaactagaggaccgttgggaattttatcaaactacgtcaagactcttcttatttctatgtattgttccaaaacatttttagacgattccaacaaacgaaaggtattggcgattgattttggaaacggtgctgacctggaaaaatacttttatggagagattgcgttattggtagcgacggatccggatgctgatgctatagctagaggaaatgaaagatacaacaaattaaactctggaattaaaaccaagtactacaaatttgactacattcaggaaactattcgatccgatacatttgtctctagtgtcagagaagtattctattttggaaagtttaatatcatcgactggcagtttgctatccattattcttttcatccgagacattatgctaccgtcatgaataacttatccgaactaactgcttctggaggcaaggtattaatcactaccatggacggagacaaattatcaaaattaacagataaaaagacttttataattcataagaatttacctagtagcgaaaactatatgtctgtagaaaaaatagctgatgatagaatagtggtatataatccatcaacaatgtctactccaatgactgaatacattatcaaaaagaacgatatagtcagagtgtttaacgaatacggatttgttcttgtagataacgttgatttcgctacaattatagaacgaagtaaaaagtttattaatggcgcatctacaatggaagatagaccgtctacaaaaaactttttcgaactaaatagaggagccattaaatgtgaaggtttagatgtcgaagacttacttagttactatgttgtttatgtcttttctaagcggtaaataataatatggtatgggttctgatatccccgttctaaatgcattaaataattccaatagagcgatttttgttcctataggaccttccaactgtggatactctgtattgttaatagatatattaatacttttgtcgggtaacagaggttctacgtcttctaaaaataaaagtttgataacatctggcctgttcataaataaaaacttggcgattctatatatactcttattatcaaatctagccattgtcttatagatgtgagctactgtaggtgtaccatttgattttctttctaatactatatatttctctcgaagaagttcttgcacatcatctgggaataaaatactactgttgagtaaatcagttattttttttatatcgatattgatggacatttttatagttaaggataataagtatcccaaagtcgataacgacgataacgaagtatttatacttttaggaaatcacaatgactttatcagattaaaattaacaaaattaaaggagcatgtatttttttctgaatatattgtgactccagatacatatggatctttatgcgtcgaattaaatgggtctagttttcagcacggtggtagatatatagaggtggaggaatttatagatgctggaagacaagttagatggtgttctacatccaatcatatatctaaagatatacccgaagatatgcacactgataaatttgtcatttatgatatatacacttttgacgctttcaagaataaacgattggtattcgtacaggtacctccgtcgttaggagatgatagtcatttgactaatccgttattgtctccgtattatcgtaattcagtagccagacaaatggtcaataatatgatttttaatcaagattcatttttaaaatatttattagaacatctgattagaagccactatagagtttctaaacatataacaatagttagatacaaggataccgaagaattaaatctaacgagaatatgttataatagagataagtttaaggcgtttgtattcgcttggtttaacggcgtttcggaaaatgaaaaggtactagatacgtataaaaaggtatctaatttgatataatgaattcagtgactgtatcacacgcgccatatactattacttatcacgatgattgggaaccagtaatgagtcaattggtagagttttataacgaagtagccagttggctgctacgagacgagacgtcgcctattcctgataagttctttatacagttgaaacaaccgcttagaaataaacgagtatgtgtgtgcggtatagatccgtatccgaaagatggaactggtgtaccgttcgaatcaccaaattttacaaaaaaatcaattaaggagatagcttcatctatatctagattaaccggagtaattgattataaaggttataaccttaatataatagacggggttataccctggaattattacttaagttgtaaattaggagaaacaaaaagtcacgcgatctactgggataagatttccaagttactgctgcagcatataactaaacacgttagtgttctttattgtttgggtaaaacagatttctcgaatatacgggcaaagttagaatccccggtaactaccatagtcggatatcatccagcggctagagaccgccaattcgagaaagatagatcatttgaaattatcaacgttttactggaattagacaacaaggcacctataaattgggctcaagggtttatttattaatgctttagtgaaattttaacttgtgttctaaatggatgcggctattagaggtaatgatgttatctttgttcttaagactataggtgtcccgtcagcgtgcagacaaaatgaagatccaagatttgtagaagcatttaaatgcgacgagttagaaagatatattgagaataatccagaatgtacactattcgaaagtcttagggatgaggaagcatactctatagtcagaattttcatggatgtagatttagacgcgtgtctagacgaaatagattatttaacggctattcaagattttattatcgaggtgtcaaactgtgtagctagattcgcgtttacagaatgcggtgccattcatgaaaatgtaataaaatccatgagatctaatttttcattgactaagtctacaaatagagataaaacaagttttcatattatctttttagacacgtataccactatggatacattgatagctatgaaacgaacactattagaattaagtagatcatctgaaaatccactaacaagatcgatagacactgccgtatataggagaaaaacaactcttcgggttgtaggtactaggaaaaatccaaattgcgacactattcatgtaatgcaaccaccgcatgataatatagaagattacctattcacttacgtggatatgaacaacaatagttattacttttctctacaacaacgattggaggatttagttcctgataagttatgggaaccagggtttatttcattcgaagacgctataaaaagagtttcaaaaatattcattaattctataataaactttaatgatctcgatgaaaataattttacaacggtaccactggtcatagattacgtaacaccttgtgcattatgtaaaaaacgatcgcataaacatccgcatcaactatcgttggaaaatggtgctattagaatttacaaaactggtaatccacatagttgtaaagttaaaattgttccgttggatggtaataaactgtttaatattgcacaaagaattttagacactaactctgttttattaaccgaacgaggagaccatatagtttggattaataattcatggaaatttaacagcgaagaacccttgataacaaaactaattttgtcaataagacatcaactacctaaggaatattcaagcgaattactctgtccgaggaaacgaaagactgtagaagctaacatacgagacatgttagtagattcagtggagaccgatacctatccggataaacttccgtttaaaaatggtgtattggacctggtagacggaatgttttactctggagatgatgctaaaaaatatacgtgtactgtatcaaccggatttaaatttgacgatacaaagttcgtcgaagacagtccagaaatggaagagttaatgaatatcattaacgatatccaaccattaacggatgaaaataagaaaaatagagagctatatgaaaaaacattatctagttgtttatgcggtgctaccaaaggatgtttaacattcttttttggagaaactgcaactggaaagtcgacaaccaaacgtttgttaaagtctgctatcggtgacctgtttgttgagacgggtcaaacaattttaacagatgtattggataaaggacctaatccatttatcgctaacatgcatttgaaaagatctgtattctgtagcgaactacctgattttgcatgtagtgggtcaaagaaaatcagatctgataatattaaaaagttgacagaaccttgtgtcattggaagaccgtgtttctccaataaaattaataatagaaaccatgcgacaatcattatcgatactaattacaaacctgtttttgataggatagataacgcattaatgagaagaattgccgtcgtgcgattcagaacacacttttctcaaccttctggtagagaggctgctgaaaataatgacgcgtacgataaagtcaaactattagacgaggggttagatggtaaaatacaaaataatagatatagattcgcatttctatacttgttggtgaaatggtacagaaaatatcatgttcctattatgaaactatatcctacacccgaagagattcctgactttgcattctatctcaaaataggtactctgttggtatctagctctgtaaagcatattccattaatgacggacctctccaaaaagggatatatattgtacgataatgtggtcactcttccgttgactactttccaacagaaaatatccaagtattttaattctagactatttggacacgatatagagagcttcatcaatagacataagaaatttgccaatgttagtgatgaatatctgcaatatatattcatagaggatatttcatctccgtaaatatatgctcatatatttatagaagatatcacatatctaaatgaataccggaatcatagatttatttgataatcatgttgatagtataccaactatattacctcatcagttagctactctagattatctagttagaactatcatagatgagaacagaagcgtgttattgttccatattatgggatcaggtaaaacaataatcgctttgttgttcgccttggtagcttccagatttaaaaaggtttacattctagtgccgaacatcaacatcttaaaaattttcaattataatatgggtgtagctatgaacttgtttaatgacgaattcatagctgagaatatctttattcattccacaacaagtttttattctcttaattataacgataacgtcattaattataacggattatctcgctacaataactctatttttatcgttgatgaggcacataatatctttgggaataatactggagaacttatgaccgtgataaaaaataaaaacaagattccttttttactattgtctggatctcccattactaacacacctaatactctgggtcatattatagatttaatgtccgaagagacgatagattttggtgaaattattagtcgtggtaagaaagtaattcagacacttcttaacgaacgcggtgtgaatgtacttaaggatttgcttaaaggaagaatatcatattacgaaatgcctgataaagatctaccaacgataagatatcacggacgtaagtttctagatactagagtagtatattgtcacatgtctaaacttcaagagagagattatatgattactagacgacagctatgttatcatgaaatgtttgataaaaatatgtataacgtgtcaatggcagtattgggacaacttaatctgatgaataatttagatactttatttcaggaacaggataaggaattgtacccaaatctgaaaataaataatggcgtgttatacggagaagaattggtaacgttaaacattagttccaaatttaaatactttattaatcggatacagacactcaacggaaaacattttatatacttttctaattctacatatggcggattggtaattaaatatatcatgctcagtaatggatattctgaatataatggttctcagggaactaatccacatatgataaacggcaaaccaaaaacatttgctatcgttactagtaaaatgaaatcgtctttagaggatctattagatgtgtataattctcctgaaaacgatgatggtagtcaattgatgtttttgttttcatcaaacattatgtccgaatcctatactctaaaagaggtaaggcatatttggtttatgactatcccagatactttttctcaatacaaccaaattcttggacgatctattagaaaattctcttacgccgatatttctgaaccagttaatgtatatcttttagccgccgtatattccgatttcaatgacgaagtgacgtcattaaacgattacacacaggatgaattaattaatgttttaccatttgacatcaaaaagctgttgtatctaaaatttaagacgaaagaaacgaatagaatatactctattcttcaagagatgtctgaaacgtattctcttccaccacatccatcaattgtaaaagttttattgggagaattggtcagacaatttttttataataattctcgtattaagtataacgataccaagttacttaaaatggttacatcagttataaaaaataaagaagacgctaggaattacatagatgatattgtaaacggtcacttctttgtatcgaataaagtatttgataaatctcttttatacaaatacgaaaacgatattattacagtaccgtttagactttcctacgaaccatttgtttggggagttaactttcgtaaagaatataacgtggtatcttctccataaaactgatgagatatataaagaaataaatgtcgagctttgttaccaatggatacctttccgttacattggaaccacacgagctgacgttagacataaaaactaatattaggaatgccgtatataagacgtatctccatagagaaattagtggtaaaatggccaagaaaatagaaattcgtgaagacgtggaattacctctcggcgaaatagttaataattctgtagttataaacgttccgtgtgtaataacctacgcgtattatcacgttggggatatagtcagaggaacattaaacatcgaagatgaatcaaatgtaactattcaatgtggagatttaatctgtaaactaagtagagattcgggtactgtatcatttagcgattcaaagtactgcttttttcgaaatggtaatgcgtatgacaatggcagcgaagtcactgccgttctaatggaggctcaacaaggtatcgaatctagttttgtttttctcgcgaatatcgtcgactcataaaaaagagaatagcggtaagtataaacacgaatactatggcaataattgcgaatgttttattctcttcgatatatttttgataatatgaaaaacatgtctctctcaaatcggacaaccatctcataaaatagttctcgcgcgctggagaggtagttgccgctcgtataatctctccagaataatatacttgcgtgtcgtcgttcaatttatacggatttctatagttctctgttatataatgcggtttgccctcatgattagacgacgacaatagtgttctaaatttagatagttgatcagaatgaatgtttattggcgttggaaaaattatccatacagcgtctgcagagtggttgatagttgttcctagatatgtaaaataatccaacttactaggcagcaaattgtctagataaaatactgaatcaaacggtgcagacgtattggcggatctaatggaatccaattgattaactatcttttgaaaatatacatttttatgatccaatacttgtaagaatatagaaataatgataagtccatcatcgtgtttttttgcctcttcataagaactatattttttcttattccaatgaacaagattaatctctccagagtatttgtacacatctatcaagtgattggatccataatcgtcttcctttccccaatatatatgtagtgatgataacacatattcattggggagaaaccctccacttatatatcctcctttaaaattaatccttactagttttccagtgttctggatagtggttggtttcgactcattataatgtatgtctaacggcttcaatcgcgcgttagaaattgcttttttagtttctatattaataggagatagttgttgcggcatagtaaaaatgaaatgataactgtttaaaaatagctcttagtatgggaattacaatggatgaggaagtgatatttgaaactcctagagaattaatatctattaaacgaataaaagatattccaagatcaaaagacacgcatgtgtttgctgcgtgtataacaagtgacggatatccgttaataggagctagaagaacttcattcgcgttccaggcgatattatctcaacaaaattcagattctatctttagagtatccactaaactattacggtttatgtactacaatgaactaagagaaatctttagacggttgagaaaaggttctatcaacaatatcgatcctcactttgaagagttaatattattgggtggtaaactagataaaaaggaatctattaaagattgtttaagaagagaattaaaagaggaaagtgatgaacgtataacagtaaaagaatttggaaatgtaattctaaaacttacaacacgggataaattatttaataaagtatatataagttattgcatggcgtgttttattaatcaatcgttggaggatttatcgcatactagtatttacaatgtagaaattagaaagattaaatcattaaatgattgtattaacgacgataaatacgaatatctgtcttatatttataatatgctagttaatagtaaatgaacttttacagatctagtataattagtcagattattaagtataatagacgactagctaagtctattatttgcgaggatgactctcaaattattacactcacggcattcgttaaccaatgcctatggtgtcataaacgagtatccgtgtccgctattttattaactactgataacaaaatattagtatgtaacagacgagatagttttctctattctgaaataattagaactagaaacatgtttagaaagaaacgattatttctgaattattccaattatttgaacaaacaggaaagaagtatactatcgtcatttttttctctagatccagctactactgataatgatagaatagacgctatttatccgggtggcatacccaaaaggggtgagaatgttccagagtgtttatccagggaaattaaagaagaagttaatatagacaattcttttgtattcatagacactcggttttttattcatggcatcatagaagataccattattaataaattttttgaggtaatcttctttgtcggaagaatatctctaacgagtgatcaaatcattgatacatttaaaagtaatcatgaaatcaaggatctaatatttttagatccgaattcaggtaatggactccaatacgaaattgcaaaatatgctctagatactgcaaaacttaaatgttacggccatagaggatgttattatgaatcattaaaaaaattaactgaggatgattgattaaaaaatataaattaatttaccatcgtgtatttttataacgggattgtccggcatatcatgtagatagttaccgtctacatcgtatactcgaccatctacgcctttaaatcctctatttattgacattaatctattagaattggaataccaaatattagtaccctcaattagtttattggtaatattttttttagacgatagatcgatggctcttgaaaccaaggttttccaaccggactcattgtcgatcggtgagaagtctttttcattagcatgaatccattctaatgatgtatgtttaaacactctaaacaattggacaaattcttttgatttgctttgaatgatttcaaataggtcttcgtctacagtaggcataccattagataatctagccattataaagtgcacgtttacatatctacgttctggaggagtaagaacgtgactattgagacgaatggctcttcctactatctgacgaagagacgcctcgttccatgtcatatctaaaatgaagatatcattaattgagaaaaaactaataccctcgcctccactagaagagaatacgcatgttttaatgcattctccgttagtgtttgattcttggttaaactcagccaccgccttgattctagtatcttttgttctagatgagaactctatattagagataccaaagactttgaaatatagtaataagatttctattcctgactgattaacaaatggttcaaagactagacatttaccatgggatgctaatattcccaaacatacatctataaatttgacgcttttctcttttaattcagtaaatagagagatatcagccgcactagcatcccctttcaatagttctccctttttaaaggtatctaatgcggatttagaaaactctctatctcttaatgaatttttaaaatcattatatagtgttgctatctcttgcgcgtattcgcccggatcacgattttgtctttcaggaaagctatcgaacgtaaacgtagtagccatacgtctcagaattctaaatgatgatatacctgtttttatttcagcgagtttagccttttgataaatttcttcttgctttttcgacatattaacgtatcgcattaatactgttttcttagcgaatgatgcagacccttctacgtcatcaaaaatagaaaactcgttattaactatatacgaacatagtcctcctagtttggagactaattctttttcatcgactagacgtttattctcaaatagtgattggtgttgtaaggatcctggtcgtagtaagttaaccaacatggtgaattcttgcacactattgacgataggtgtagccgataaacaaatcatcttatggttttttaacgcaatggtcttagataaaaaattatatactgaacgagtaggacggatcttaccatcttctttgattaatgatttagaaatgaagttatgacattcatcaatgatgacgcatattctactcttggaattaatagttttgatattagtaaaaaatttatttctaaaattttgatcatcgtaattaataaaaatacaatccttcgttatctctggagcgtatctgagtatagtgttcatccaaggatcttctatcaaagcctttttcaccaataagataatagcccaattcgtataaatatccttaagatgtttgagaatatatacagtagtcattgttttaccgacacccgtttcatggaacaataaaagagaatgcatactgtctaatcctaagaaaactcttgctacaaaatgttgataatccttgaggcgtactacgtccgaccccatcatttcaacgggcatattagtagttctgcgtaaggcataatcgatataggccgcgtgtgatttactcatttatgagtgataagtaataactatgttttaaaaatcacagcagtagtttaactagtcttctctgatgtttgttttcgatactttttgaatcagaagtcatactagaataaagcaacgagtgaacgtaatagagagcttcgtatactctattcgaaaactctaagaacttattaatgaattccgtatccactggattgtttaaaatactaaattgaacactgttcacatccttccaagaagaagacttagtgacggacttaacatgagacataaataaatccaaattttttttacaaacatcactagccaccataatggcgctatctttcaaccagctatcgcttacgcattttagcagtctaacatttttaaagagactacaatatattctcatagtatcgattacacctctaccgaataaagttggaagtttaataatacaatatttttcgtttacaaaatcaaataatggtcgaaacacgtcgaaggttaacatcttataatcgctaatgtatagattgttttcagtgagatgattattagatttaatagcatctcgttcacgtttgaacagtttattgcgtgcgctgaggtcggcaactacggcgtccgctttagtactcctcccataatactttacgctattaatctttaaaatttcatagactttatctagatcgctttctggtaacatgatatcatgtgtaaaaagttttaacatgtcggtcggcattctatttagatcattaactctagaaatctgaagaaagtaattagctccgtattccagactaggtaatgggcttttacctagagacagattaagttctggcaatgtttcataaaatggaagaaggacatgcgttccctcccggatattttttacaatttcatccatttacaactctatagtttgttttcattattattagttattatctcccataatcttggtaatacttaccccttgatcgtaagataccttatacaggtcattacatacaactaccaattgtttttgtacataatagattggatggttgacatccatggtggaataaactactcgaacagatagtttatctttccccctagatacattagccgtaatagttgtcggcctaaagaatatctttggtgtaaagttaaaagttagggttcttgttccattattgctttttgtcagtagttcattataaattctcgagatgggtccgttctctgaatatagaacatcatttccaaatctaacttctagtctagaaataatatcggtcttattcttaaaatctattcccttgatgaagggatcgttaatgaacaaatccttggcctttgattcggctgatctattatctccgttatagacgttacgttgactagtccaaagacttacaggaatagatgtatcgatgatgttgatactatgtgatatgtgagcaaagattgttctcttagtggcatcactatatgttccagtaatggcggaaaactttttagaaatgttatatataaaagaattttttcgtgttccaaacattagcagattagtatgaagataaacactcatattatcaggaacattatcaatttttacatacacatcagcatcttgaatagaaacgataccatcttctggaacctctacgatctcggcagactccggataaccagtcggtggaccatcgctaacaataactagatcatccaacaatctactcacatatgcatctatataatctttttcatcttgtgagtaccctggatacgaaataaatttattatccgtatttccataataaggtttagtataaacagagagagatgttgccgcatgaacttcagttacagtcgccgttggttggtttatttgacctattactctcctaggtttctctataaacgatggtttaatttgtacattcttaaccatatatccaataaagctcaattcaggaacataaacaaattctttgttgaacgtttcaaagtcgaacgaagagtcacgaataacgatatcggatactggattgaaggttaccgttacggtaatttttgaatcggatagtttaagactgctgaatgtatcttccacatcaaacggagttttaatataaacgtatactgtagatggttctttaatagtgtcattaggagttaggccaatagaaatatcattaagttcactagaatatccagagtgtttcaaagcaattgtattattgatacaattattatataattcttcgccctcaatttcccaaataacaccgttacacgaagagatagatacgtgattaatacatttatatccaacatatggtacgtaactgaatcttcccatacctttaacttctggaagttccaaactcagaaccaaatgattaagcgcagtaatatactgatccctaatttcgaagctagcgatagcctgattgtctggaccatcgtttgtcataactccggatagagaaatatattgcggcatatataaagttggaatttgactatcgactgcgaagacattagaccgtttaatagagtcatccccaccgatcaaagaattaatgatagtattattcattttctatttaaaatggaaaaagcttacaataaactccgtagagaaatatctataatttgtgagttttccttaaagtaacagcttccgtaaacgccgtctttatctcttagtaggtttattgtatttatgaccttttccttatcttcatagaatactaaaggcaacaaagaaatttttggttcttctctaagagctacgtgagacttaaccatagaagccaacgaatccctacatattttagaacagaaataccctacttcaccacccttgtatgtctcaatactaataggtctaaaaaccaaatcttgattacaaaaccaacacttatcaattacactatttgtcttaatagacacatctgccatagatttataatactttggtagtatacaagcgagtgcttcttctttagcgggcttaaagactgctttaggtgctgaaataaccacatctggaaggcttactcgcttagccatttaattacggaactatttttttatacttctaatgagcaagtagaaaacctctcatctacaaaaacgtactcgtgtccataatcctctaccatagttacacgttttttagatctcatatgtgctaaaaagttttcccatactaattggttactattatttttcgtataatttttaacagtttgaggttttagatttttagttacagaagtgatatcgaatattttatccaaaaagaatgaataattaattgtcttagaaggagtgttttcttggcaaaagaataccaagtgcttaaatatttctactacttcattaatcttttctgtactcagattcagtttctcatcttttacttgattgattatttcaaagactaacttataatcctttttatttattctctcgttagccttaagaaaactagatacaaaatttgcatctacatcatccgtggatatttgatttttttccatgatatccaagagttccgagataatttctccagaacattgatgagacaataatctccgcaatacatttctcaaatgaataagtttattagacacgtggaagtttgactttttttgtacctttgtacatttttgaaataccgactcgcaaaaaatacaatattcatatccttgttcagatactataccgttatgtctacaaccgctacataatcgtagattcatgttaacactctacgtatctcgtcgtccaatattttatataaaaacattttatttctagacgttgccagaaaatcctgtaatatttttagttttttgggctgtgaataaagtatcgccctaatattgttaccgtcttccgccaatatagtagttaaattatccgcacatgcagaagaacaccgcttaggcggattcagtacaatgttatatttttcgtaccaactcatttaaatatcataatctaaaatagttctgtaatatgtctagcgctaatatattgatcataatcctgtgcataaattaagatacaacaatgtctcgaaatcatcgacatggcttcttccatagttagaagatcgtcgtcaaagttagcaacgtgattcatcaacatttgctgttttgaggcagcaaatactgaaccgtcgccattcaaccattcataaaaaccatcgtctgaatccattgataatttcttgtactggtttttgagagctcgcatcaatctagcatttctagctcccggattgaaaacagaaagaggatcgtacatccagggtccattttctgtaaatagaatcgtataatgtcccttcaagaagatatcagacgatccacaatcaaagaattggtctccgagtttgtaacagacagcggactttaacctatacatgataccgtttagcataatttctggtgatacgtcaatcggagtatcatctattagagatctaaagccggtgtaacattctccaccaaacatattcttattctgacgtcgttctacataaaacatcattgctccattaacgataacaggggaatgaacagcactacccatcacattagttcccaatggatcaatgtgtgtaactccagaacatcttccatagcctatgttaggaggagcgaacaccactcttccactattgccatcgaatgccatagaataaatatccttggaattgatagaaatcggactgtcggatgttgtgatcatcttcataggattaacaactatgtatggtgccgcctgaagtttcatatcgtaactgatgccgtttataggtctagccacagaaaccaacgtaggtctaaatccaactatagacaaaatagaagccaatatctgttcctcatctgtcataacttgagagcatccagtatgaataatcttcattagatggggatctaccgcatcatcatcgttacaataaaaaattcccattctaatgttcataattgcttttctaatcatggtatgcatgtttgctctctgaatctctgtggaaattagatctgatacacctgtaatcactatcggattatcctccgtaagacgattaaccaacaacatataattataagactttacttttctaaattcataaagttgctggattaggctataggtgtctccatgtacatacgcgttctcgagcgcaggaagtttaataccgaatagtgccatcagaataggatgaatatagtaattagtttctggttttctataaataaaagacaaatcttgtgaactagacatatcggtaaaatgcatggattggaatcgtgtagtcgacagaagaatatgatgattagatggagagtatattttatctaactctttgagttggtcaccgattctaggactagctcgagaatgaataagtactaaaggatgagtacatttcacagaaacactagcattgttcaatgtgctctttacatgggtaaggagttgaaatagctcgtttctatttgttctgacaatatttagtttattcataatgttaagcatatcctgaatagtaaagttagatgtgtcatacttgttagtagttagatatttagcaattgcattcccatcatttctcaatctcgtactccaatcatgcgtagatgctacttcatctatagaaaccatacaatcctttttgataggctgttgagattgattatttcctgcacgtttaggtttggtacgttgatttctagcccctgcggatataaagtcatcgtctacaatttgggacaatgaattgcatacactacaagacaaagatttatcagaagtgtgaatatgatcttcatctaccaaagaaagagtttgattagtataactagattttagtcctgcgttagatgttaaaaaaacatcgctattgaccacggcttccattatttatattcgtagtttttactcgaaagcgtgattttaatatccaatcttattacttttggaatcgttcaaaacctttgactaattgtagaatttgatctattgccctacgcgtatactcccttgcatcatatacgttcgtcaccagatcgtttgtttcggcctgaagttggtgcatatctctttcaacattcgacatgagatccttaagggccatatcgtctagattttgttgagatgctgctcctggatttggattttgttgtgctgttgtacatactgtaccaccagtaggtgtaggagtacatacagtggccacaataggaggttgaggaggtgtaaccgttggagtagtacaagaaatacttccatccgattgttgtgtacatgtagttgttggtaacgtctgagaaggttgggtagatggcggcgtcgtcgttttttgatctttattaaatttagagataatatcctgaacagcattgctcggcgtcaacgctggaaggagtgaactcgccggcgcatcagtatcttcagacagccaatcaaaaagattagacatatcagatgatgtattagtttgttgtcgtggttttggtgtaggagcagtactactaggtagaagaataggagccggtgtagctgttggaaccggctgtggagttatatgaatagttggttgtagcggttggataggctgtctgctggcggccatcatattatctctagctagttgttctcgcaactgtctttgataatacgactcttgagactttagtcctatttcaatcgcttcatcctttttcgtatccggatccttttcttcagaataatagattgacgactttggtgtagaggattctgccagcctctgtgagaacttgttaaagaagtccatttaaggctttaaaattgaattgcgattataagattaaatggcagacacagacgatattatcgactatgaatccgatgatctcaccgaatacgaggatgatgaagaagaggaagaagatggagagtcactagaaactagtgatatagatcccaaatcttcttataagattgtagaatcagcatccactcatatagaagatgcgcattctaatcttaaacatatagggaatcatatatctgctcttaaacgacgctatactagacgtataagtctatttgaaatagcgggtataatagcagaaagctataacttgcttcaacgaggaagattacctctagtttcagaattttctgacgaaacgatgaagcaaaatatgctacatgtaattatacaagagatagaggagggttcttgtcctatagtcatcgaaaagaacggagaattgttgtcggtaaacgattttgacaaagatggtctaaaattccatctagactatattatcaaaatttggaaacttcaaaaacgatattagaatttatacgaatatcgttctctaaatgtcacaatcaagtctcgcatgttcagcaatttattgtcgtactttatatcgtgttcattaacgatatcttgcaaaatagtaatgattctatcttccttcgatagatattcttcagagattattgtcttatattctttcttgttatccgatatgaatttgataagactttgaacattattgatacccgtctgtttaattttttctacagatattttagttttggcagattctatcgtatctgtcaatagacatccaacatcgacattcgacgtcaattgtctataaatcaacgtataaattttagaaataacattagcgaattgttgtgcgttgatgtcgttattctgaaacagtatgattttaggtagcattttcttaacaaagagaacgtatttattgttactcagttgaacagatgatatatccagattactaacgcatctgattccgtataccaaactttcagaagaaatggtgtacaattgtttgtattcattcaatgtctctttttcagaaattagtttagagtcgaatactgcaataattttcaagagatagttttcatcagataagattttatttagtgtagatatgataaaactattgttttgttggagaacttgatacgccgcgttctctgtagtcgacgctctcaaatgggaaacaatctccattatttttttggaatcggatacaatatcttcggtatcttgacgcagtctagtatacatagagttaagagagattagagtttgtacattaagcaacatgtctctaaatgtggctacaaacttttcctttttcacatcatctagtttattatataccgatttcacaacggcaccagatttaaggaaccagaatgaaaaactctgataactacaatatttcatcatagttacgattttatcatcttctatagttggtgtaatagcgcatacctttttctccaagactggaaccaacgtcataaaaatgtttaaatcaaaatccatatcaacatctgatgcgctaagaccagtctcgcgttcaagattatctttactaatggtgacgaactcatcgtataaaactctaagtttgtccattatttatttacagatttagttgtttaatttatttgtgctcttccagagttgggatagtatttttctaacgtcggtattatattattaggatctacgttcatatgtatcataatattaatcatccacgttttgataaatctatctttagcttctgaaataacgtatttaaacaaaggagaaaaatatttagctacggcatcagacgcaataacattttttgtaaatgtaacgtatttagacgacagatcttcgttaaaaagttttccatctatgtagaatccatcggttgttaacaccattcccgcgtcagattgaataggagtttgaatagtttgttttggaaatagatccttcaataacttatagttgggtgggaaaaaatcgattttatcactagactctttcttttttactatcattacctcatgaactatttcttgaatgagtatatgtattttctttcctatatcggacgcgttcattggaaaatataccatgtcgttaactataagaatatttttatcctcgtttacaaactgaataatatcagatgtagttcgtaaacgaactatatcatcaccagcacaacatctaactatatgatatccactagtttcctttagccgtttattatcttgttccatattagcagtcattccatcatttaagaaggcgtcaaagataatagggagaaatgacattttggattctgttacgactttaccaaaattaaggatatacggacttactatctttttctcaacgtcaatttgatgaacacacgatgaaaatgtgcttctatgagattgatcatgtagaaaacaacaagggatacaatatttccgcatatcatgaaatatattaagaaatcccaccttattatatttccccaaaggatccatgcacgtaaacattatgccgttatcattaataaagacttctttctcatcggatctgtaaaagttgttactgatttttttcattccaggatctagataattaataatgatgggttttctattcttattctttgtattttggcatatcctagaccagtaaacagtttccactttggtaaaatcagcagacttttgaacgctattaaacatggcattaatggcaataactaaaaatgtaaaatatttttctatgttaggaatatggtttttcactttaatagatatatggtttttggccaaaatgatagatatttttttatccgaggatagtaaaatattattagtcgccgtctctataaaaatgaagctagtctcgatatccaattttattctagaattgataggagtcgccaaatgtaccttatacgttatatctcccttgatgcgttccatttgtgtatctatatcggacacaagatctgtaaatagttttacgttattaatcatcacggtatcgccgtcgctagataacgctaatgtaccatccaagtcccaaatggagagatttaactgttcatcgtttagaataaaatgattaccggtcatattaataaagtgttcatcgtatctagataacaacgacttataattaatgtccaagtcttgaactcgctgaatgatcttttttaacccagttagttttagattggtacgaaatatattgttaaactttgattctacagtaatgtccaaatctagttgtggaaatacttccatcaacattgtttcaaacttgataatattattatctacatcttcgtacgatccaaattccggaatagatgtatcgcacgctctggccacccagataaccaaaaagtcacacgctccaggatatacattgtataaaaagctatcgttttttagtagggtttttttctgcgtgtatacgaagggattaaaaatagtattatcaacgtaactatattccaaattattcttatgagaatagataataatatcgtccttaatatctaacaaatttcctaaatatccctttaattgagtcattcgaagcgtcaatagaatatgtctcttaactatttccggctgttgtatatttaaatgacttcgtaaaaaataatatatgggcgacttctcatctatgtaatcatatggagtgagatatagggctcgttctacctcctgccccttacccacctgtaataccaattgcggacttactatatatcgcatatttatatcgtggggtaaagtgaaaatctactaccgatgatgtaagtcttacaatgttcgaaccagtaccagatcttaatttggaggcctccgtagaactaggggaggtaaatatagatcaaacaacacctatgataaaggagaatagcggttttatatcccgcagtagacgtctattcgcccatagatctaaggatgatgagagaaaactagcactacgattctttttacaaagactttattttttagatcatagagagattcattatttgttcagatgcgttgacgctgtaaaagacgtcactattaccaaaaaaaataacattatcgtggcgccttatatagcacttttaactatcgcatcaaaaggatgcaaacttacagaaacaatgattgaagcattctttccagaactatataatgaacatagtaagaaatttaaattcaactctcaagtatccatcatccaagaaaaactcggataccagtttggaaactatcacgtttatgattttgaaccgtattactctacagtagctctggctattcgagatgaacattcatctggcatttttaatatccgtcaagagagttatctggtaagttcattatctgaaataacatatagattttatctaattaatctaaaatctgatcttgttcaatggagtgctagtacgggcgctgtaattaatcaaatggtaaatactgtattgattacagtgtatgaaaagttacaactggtcatagaaaatgattcacaatttacatgttcattggctgtggaatcaaaacttccaataaaattacttaaagatagaaatgaattatttacaaaattcattaacgagttaaaaaagaccagttcattcaagataagcaaacgcgataaggatacgctactaaaatattttacttaggactggagttagaatttatagacgactcatttcgtttatcattgttactattattactattactatcattattagtgttggcattattagtattcttcttgtcatcttgttcagaaatatacagcaatgctatacctaatactaaatacattatcatgctcgcaatggctctaacaacaacgaaccaaaatgaatttggtcgtagcttttgttcacaaaaatacataaagaaatgtctacataaatctatggcgccattggctacttgaaatagcgccagtcctcctacagattttaatatagctgtataacatgacatttattcatcatcaaaagagacagagtcaccatctgtcatatttagattttttttcatgtgttcaaagtatcctctactcatttcattataatagtttatcatacttagaattttaggacggatcaatgagtaagacttgactagatcgtcagtagtaatttgtgcatcgtctattctgcatccgcttcgtcgaataatgtatagcatcgctttgagattctccatagctatcaagtctttatacaatgacatggaaatatctgtgaatactttatacttctccaacatcgatgccttaacatcatcgcctactttagcattgaaaatacgttctattgtgtagatggatgtagcaagatttttaaacaacaatgccatcttacacgatgattgcctcaagtctccaatcgtttgtttagaacgattagctacagagtccaatgcttggctgactagcatattattatctttagaaattgtattcttcaatgaggcgtttatcatatctgtgatttcgttagtcatattacagtctgactgggttgtaatgttatccaacatatcacctatggatacggtacacgtaccagcatttgtaataatcctatctaagatgttgtatggcattgcgcagaaaatatcttctcctgtaatatctccactctcgataaatctactcagattattcttaaatgccttattctctggagaaaagatatcagtgtccatcatttcattaatagtatacgcagaaaagataccacgagtatcaattctatccaagatacttatcggttccgagtcacagataatggtttcctctccttcgggagatcctgcatagaaatatctaggacaatagtttctatactgtctgtaactctgataatctctaaagtcactaactgataccatgaaattgagaagatcaaacgctgaagtaattaatttttctgcctcgtttttactacaactagttttcatcaatgtagtgacgatgtattgtttagttacttttggtctaatactgatgatagagatattattgcttcccataatggatcttctagtagtcaccttaaagcccattgatgcgaatagcagatagataaagtcttggtatgactcctttctaatatagtacggactacctttgtcacccaactttatacccacataagccataacaacctctttaatagccgtttcatgaggtttatcagccatgagcctgagtagttggaagaatctcatgaatcccgtctcagaaagtcctatatgcatgatagatttatctttcctgggaaactctcgtatagtcatagatgaaatactctttaaagtttctgaaataagattagtaacagtcttacctccgactactctaggtaacaaacaaactctaataggtgttttctctgcggagataatatcagaaaggatagagcaataagtagtattattgtgattataaagaccgaatacataacaggtagaatttataaacatcatgtcctgaaggtttttagacttgtattcctcgtaatccataccgtcccaaaacatggatttggtaactttgatagccgtagatctttgttccttcgccaacaggttaaagaaattaataaagaatttgttgtttctatttatgtccacaaattgcacgtttggaagcgccacggttacattcactgcagcattttgaggatcgcgagtatgaagtacgatgttattgtttactggtatatctggaaagaaatctaccagtctaggaataagagattgatatcgcatagaaatagtaaagtttataatctcatcatcgaagagcattttgttaccattgtaataaatatccactctgtcatatgtataaatgaagtactgttcaaacatgatgagatgtttatatgttggcatagtagtgagatcgacgtttggtaatggcaatgtattaagattaactccataatgtctagcagcatctgcgatgttataagcgtcgtcaaagcggggtcgatcttgtattgttatatattgtctaacacctataagattatcaaaatcttgtctgcttaatacaccgttaacaatttttgccttgaattcttttattggtgcattaataacatccttatagaggatgttaaacaaataagtgttatcaaagttaagatctggatatttcttttctgctagaacatccattgagtcggagccatctggtttaatataaccaccgataaatctagctctgtattctgtatccgtcaatctaatattaagaaggtgttgagtgaaaggtggaagatcgtaaaagctgtgagtattaatgataggattagtttccgaactaatgttaattggggtattaataatatctatatttccagcgttaagtgtaacattaaacagttttaattcacgtgacgtggtatcaattaaataattaatgcccaatttggatatagcagcctgaagctcatcttgtttagttacggatcctaatgagttattaagcaatatatcgaacggatgaacgaaggttgttttgagtttgtcgcatactttgtaatctagacatagatgcggaagaacggtagaaactatacgaaataaatattcagagtcctctaattgatcaagagtaactattgacttaataggcatcatttatttagtattaaatgacgaccgtaccagtgacggatatacaaaacgatttaattacagagttttcagaagataattatccatctaacaaaaattatgaaataactcttcgtcaaatgtctattctaactcacgttaacaacgtggtagatagagaacataatgccgccgtagtgtcatctccagaggaaatatcctcacaacttaatgaagatctatttccagatgatgattcaccggccactattatcgaacgagtacaacctcatactactattattgacgatactccacctcctacgtttcgtagagagttattaatatcggaacaacgtcaacaacgagaaaaaagatttaatattacagtatcgaaaaatgctgaagcaataatggaatctagatctatgataacttctatgccaacacaaacaccatccttgggagtagtttatgataaagataaaagaattcagatgttagaggatgaagtggttaatcttagaaatcaacgatctaatacaaaatcatctgataatttagataattttaccaaaatactatttggtaagactccgtacaaatcaacagaagttaataagcgtatagccatcgttaattatgcaaatttgaacgggtcccccttatcagtcgaggacttggatgtttgttcggaggatgaaatagatagaatctataaaacgattaaacaatatcacgaaagtagaaaacgaaaaattatcgtcactaacgtgattattattgtcataaacattatcgagcaggcattgctaaaactcggatttgaagaaatcaaaggactgagtaccgatatcacttcagaaattatcgatgtggagatcggagatgactgcgatgctgtagcatctaaactaggaatcggtaacagtccggttcttaatattgtattgtttatactcaagatattcgttaaacgaattaaaattatttaatttaatacattcccatatccagacaacaatcgtctggattaatctgttcctgtcgtctcataccggacgacatattaatctttttattagtgggcatctttttagatggtttctttttcccagcattaactgagtcgatacctagaagatcgtgattgatctctccgaccattccacgaacttctaattggccgtctctgacggtaccataaactattttaccagcattagtaacagcttggacaatctgaccatccatcgcattgtacgatgtagtagtaactgttgttctacgtctaggagcaccagaagtatttttggagcccttggatgttgatgtagaagaagacgaggattttgattttggtttacatgtaatacattttgaactctttgattttgtatcacatgcgccggcagtcacatctgtttgagaattaagattattgttgcctcctttgacggctgcatctccaccgatttgcgctagtagatttttaagctgtggtgtaatcttattaactgtttcgatataatcatcgtaactgcttctaacggctaaattttttttatccgccatttagaagctaaaaatatttttatttatgcagaagatttaactagattatacaatgaactaatatgatccttttccagattatttacaaacttggtattttttggttctggaggaggcgaatttaaattcggacttggattcggattttgtaagttcttgatcttattatacatcgagtataggatggcgacagtaactgctacacaaataccgatcaaaagaagaataccaatcatttattgacaataacttcactattgatcaagtatgcaatatatcatcttttcactaaataagtagtaataatgattcaacaatgtcgagatatatggacgataataatttagttcatggaaatatcgctatgattggtgtgaatgactccgctaactctgtggggtgcgcagtgctttccccacatagaataaattagcattccgactgtgataataataccaagtataaacgccataatactcaatactttccatgtacgagtgggactggtagacttactaaagtcaataaaggcgaagatacacgaaagaatcaaaagaatgattccagcgattagcacgccggaaaaataatttccaatcataagcatcatgtccatttaactaataaaaattttaaatcgccgaatgaacaaagtggaatataaaccatataaaaacaatagtttgtactgcaaaaataatatctatttttgttttcgaagatatggtaaaattaaatagtagtacacagcatgttataactaacagcagcaacggctcgtaattacttatcatttactagacgaaaaggtggtgggatattttcttgctcaaataatacgaatatatcacccatccattttatgcgatgtttatatactctaatctttaatagatctatagacgacgggtttaccaacaatatagattttatcgattcatctaatttaaacccttccttaaacgtgaatgatctattatctggcataacgatgaccctacctgatgaatcggacaatgtactgggccatgtagaataaattatcaacgaattatcgtctacgaacatttatatcatttgttttaattttaggacgcgaataaatggatataaaatagaaaataacagatattacaaccagtgttatggccgcgcccaaccaggtaggcagttttattttatcttttactacaggttctcctggatgtacgtcaccaacggcggacgtagttctagtacaattagacgtaagttccgcttgggaattttttaacgctaaagagttaacgttaatcgtgcacccaacgtatttacatctagttcgttgaacatcttgattataatataaccattttctatctctagattcgtcagtgcactcatgtaaccaacataccctaggtcctaaatatttatctccggaattagattttggataattcgcgcaccaacaatttctatttcctttatgatcgttacaaaagacgtataatgccgtatccccaaaagtaaaataatcaggacgaataattctaataaactcagaacaatatctcgcatccatatgtttggagcaaatatcggaataagtagacatagccggtttccgttttgcacgtaaccattctaaacaattggggtttccaggatcgtttctacaaaatccagtcatgaaatcgtcacaatgttctgtcttgtaattattattaaatatttttggacagtgtttggtatttgtcttagaacaacattttgccacgctatcactatcgcccaggagataatccttttttataaaatgacatcgttgcccggatgctatataatcagtagcgtgttttaaatccttaatatattcaggagttacctcgttctgataatagattaatgatccaggacgaaatttgaaagaactacatggttctccatgaattaatacatattgtttagcaaattcaggaactataaaactactacaatgatctatcgacataccatctatcaaacaaaacttgggtttaatttctcccggagatgtttcataatagtacgtataactttcttctgcaaacttaacagctctattatattcaggataattaaaacctaattccatatatttgtctcgtatatctgctattcctggtgctattttgattctattaagagtaacagctgcccccattcttaataatcgtcagtatttaaactgttaaatgttggtatatcaacatctaccttatttcccgcagtataaggtttgttgcaggtatactgttcaggaatggttacatttatacttcttctatagtcctgtctttcgatgttcatcacatatgcaaagaacagaataaacaaaataatgtaagaaataatattaaatatctgtgaattcgtaaatacattgattgccataataattacagcagctacaatacacacaatagacattcccacagtgttgccattacctccacgatacatttgagttactaagcaataggtaataactaagctagtaagaggcaatagaaaagatgagataaatatcatcaatatagagattagaggagggctatatagagccaagacgaacaaaatcaaaccgagtaacgttctaacatcattatttttgaagattcccaaataatcattcattcctccataatcgttttgcatcatacctccatctttaggcataaacgattgctgctgttcctctgtaaataaatctttatcaagcactccagcacccgcagagaagtcgtcaagcatattgtaatatcttaaataactcatttatatattaaaaaatgtcactattaaagatggagtataatctttatgccgaactaaaaaaaatgacttgtggtcaacccctaagtctttttaacgaagacggggatttcgtagaagttgaaccgggatcatcctttaagtttctgatacctaagggattttacgcctctccttccgtaaagacgagtctagtattcgagacattaacaacgaccgataataaaatcactagtatcaatccaacaaatgcgccaaagttatatcctcttcaacgcaaagtcgtatctgaagtagtttctaatatgaggaaaatgatcgaatcaaaacgtcctctatacattactcttcacttggcgtgtggatttggtaagactattaccacgtgttatcttatggctacacacggtagaaaaaccgtcatttgcgtacccaataaaatgttaatacatcaatggaagacacaggtagaggcagtcggattggaacataagatatccatagatggagtaagtagtctattaaaggaactaaagactcaaagtccggatgtattaatagtagtcagtagacatctgacaaacgatgccttttgtaaatatatcaataagcattatgatttgttcatcttggatgaatcacatacgtataatctgatgaacaatacagcagttacaagatttttagcgtattatcctccgatgatgtgttattttttaactgctacacctagaccatctaaccgaatttattgtaacagtattattaatattgccaagttatccaatctaaaaaaaactatctatgcagtagatagtttttttgagccatattccacagataatattagacatatggtaaaacgactagatggaccatctaataaatatcatatatataccgagaagttattatctgtagacgagcctagaaatcaacttattcttgataccctggtagaagaattcaagtcaggaactattaatcgcattttagttattactaaactacgtgaacatatggtattattctacaaacgattattagattttttcggaccagaggttgtatttataggagacgcccaaaatagacgtactccagatatggtcaaatcaatcaaggaactaaatagatttatattcgtatccaccttattttattccggtactggtttagatattcctagtttggattcgttgttcatttgctcggcagtaatcaacaatatgcaaatagagcaattactagggagggtatgtcgagaaacagaactattagataggacggtatatgtatttcctaacacatccatcaaagaaataaagtacatgataggaaatttcatgcaacgaattattagtctgtctgtagataaactaggatttaaacaaaaaagttatcggaaacatcaagaatccgatcccacttctgtatgtacaacatcctccagagaagaacgtgtattaaatagaatatttaactcgcaaaatcgttaagaagtttaagcgacgatccgcatgctgcgcaggccagtgtattacccctcatagtattaatataatccaatgatacttttgtgatgtcggaaatcttaaccaatttagactgacaggcagaacacgtcatgcaatcatcatcgtcatcgataactgtagtcttgggcttctttttgcgactcttcattccggaacgcacattggtgctatccatttaggtagtaaaaaataagtcagaatatgccctataacacgatcgtgcaaaacctggtatatcgtctctatctttatcacaatatagtgtatcgacatttttattattattgacctcgtttatcttggaacatggaatgggaacatttttgttatcaacggccatctttgccttaattccagatgttgtaaaattataactaaacagtctatcatcgacacaaatgaaattcttgtttagacgtttgtagtttacgtatgcggctcgttcgcgtctcattttttcagatattgcaggtactataatattaaaaataagaatgaaataacataggattaaaaataaagttatcatgacttctagcgctgatttaactaacttaaaagaattacttagtctgtacaaaagtttgagattttcagattctgcggctatagaaaagtataattctttggtagaatggggaacatctacttactggaaaataggcgtgcaaaaggtagctaatgtcgagacgtcaatatctgattattatgatgaggtaaaaaataaaccgtttaatattgatccgggctattacattttcttaccggtatattttgggagcgtctttatttattcgaagggtaaaaatatggtagaacttggatctggaaactcttttcaaataccagatgatatgcgaagtgcgtgtaacaaagtattagacagcgataacggaatagactttctgagatttgttttgttaaacaatagatggataatggaagatgctatatcaaaatatcagtctccagttaatatatttaaactagctagtgagtacggattaaacatacccaaatatttagaaattgaaatagaggaagacacattatttgacgacgagttatactctattatagaacgctctttcgatgataaatttccaaaaatatccatatcgtatattaagttgggagaacttagacggcaagttgtagactttttcaaattctcattcatgtatattgagtccatcaaggtagatcgtataggagataatatttttattcctagcgttataacaaaatcaggaaaaaagatattagtaaaagatgtagaccatttaatacgatccaaggttagagaacatacatttgtaaaagtaaaaaagaaaaacacattttccattttatacgactatgatggaaacggaacagaaactagaggagaagtaataaaacgaattatagacactataggacgagactattatgttaacggaaagtatttctctaaggttggtagtgcaggcttaaagcaattgactaataaattagatattaatgagtgcgcaactgtcgatgagttagttgatgagattaataaatccggaactgtaaaacgaaaaataaaaaaccaatcagcatttgatttaagcagagaatgtttgggatatccagaagcggattttataacgttagttaataacatgcggttcaaaatagaaaattgtaaggttgtaaatttcaatattgaaaatactaattgtttaaataacccgagtattgaaactatatatggaaactttaaccagttcgtctcaatctttaatgtcgtcaccgatgtcaaaaaaagattattcgagtgaaataatatgcgcctttgatataggtgcaaaaaatcctgccagaactgttttagaagtcaaggataactccgttagggtattggatatatcaaaattagactggagttctgattgggaaaggcgcatagctaaagatttgtcacaatatgaatacactacagttcttctagaacgtcagcctagaaggtcgccgtatgttaaatttatctattttattaaaggctttttatatcatacatcggctgccaaagttatttgcgtctcgcctgtcatgtctggtaattcatatagagatcgaaaaaagagatcggtcgaagcatttcttgattggatggacacattcggattgcgagactccgttccggatagacgcaaattagacgatgtagcggatagtttcaatttggctatgagatacgtattagataaatggaatactaattatacaccttataataggtgtaaatctagaaattacataaaaaaaatgtaataacgttagtaacgccattatggataatctatttacctttctacatgaaatagaagatagatatgccagaactatttttaactttcatctaataagttgcgatgaaataggagatatatatggtcttatgaaagaacgcatttcctcagaggatatgtttgataatatagtgtataataaagatatacatcctgccattaagaaactagtgtattgcgacatccaacttactaaacacattattaatcagaatacgtatccggtatttaacgattcttcacaagtgaaatgttgtcattatttcgacataaactcagataatagcaatattagctctcgtacagtagagatatttgagagggaaaagtcatctcttgtatcatatattaaaactaccaataagaagagaaaggtcaattacggcgaaataaagaaaactgttcatggaggcactaatgcaaattacttttccggtaaaaagtctgacgagtatctgagtactacagttagatccaacattaatcaaccttggatcaaaaccatctctaagaggatgagagttgatatcattaatcactctatagtaacgcgtggaaaaagctctatattacaaactatagaaattatttttactaatagaacatgtgtgaaaatattcaaggattctactatgcacattattctatccaaggacaaggatgaaaaggggtgtatacacatgattgacaaattattctatgtctattataatttatttctgttgttcgaagatatcatccaaaacgagtactttaaagaagtagctaatgttgtaaaccacgtactcacggctacggcattagatgagaaattattcctaattaagaaaatggctgaacacgatgtttatggagttagcaatttcaaaatagggatgtttaacctgacatttattaagtcgttggatcataccgttttcccctctctgttagatgaggatagcaaaataaagttttttaaggggaaaaagctcaatattgtagcattacgatctctggaggattgtataaattacgtgactaaatccgagaatatgatagaaatgatgaaggaaagatcgactattttaaatagcatagatatagaaacggaatcggtagatcgtctaaaagaattgcttctaaaatgaaaaaaaacactaattcagaaatggatcaacgactagggtataagtttttggtgcctgatcctaaagccggagttttttatagaccgttacatttccaatatgtatcgtattctaattttatattgcatcgattgcatgaaatcttgaccgtcaagcggccactcttatcgtttaagaataatacagaacgaattatgatagaaattagcaatgttaaagtgactcctccagattactcacctataatcgcgagtattaaaggtaagagttatgacgcattagccacgttcactgtaaatatctttaaagaggtaatgaccaaagagggtatatccatcactaaaataagtagttatgagggaaaagattctcatttgataaaaattccgctactaataggatacgggaataaaaatccacttgatacagccaagtatcttgttcctaatgtcataggtggagtctttatcaataaacaatctgtcgaaaaagtaggaattaatctagtagaaaagattacaacatggccaaaatttagggttgttaagccaaactcattcactttctcgttttcctccgtatcccctcctaatgtattaccgacaagatatcgccattacaagatatctctggatatatcacaattggaagcgttgaatatatcatcgacaaagacatttataacggtcaatattgttttgctgtctcaatatttatctagagtgagtctagaattcattagacgtagtttatcatacgatatgcctccagaagttgtctatctagtaaacgcgataatagatagtgctaaacgaattactgaatctattactgactttaatattgatacatacattaatgacctggtggaagctgaacacattaaacaaaaatctcagttaacgattaacgagttcaaatatgaaatgctgcataactttttacctcatatgaactatacacccgatcaactaaagggattttatatgatatctttactaagaaagtttctctactgtatcttccacacttctagatatccagatagagattcgatggtttgtcatcgcatcctaacgtacggcaaatattttgagacgttggcacatgatgaattagagaattacataggcaacatccgaaacgatatcatgaacaatcacaagaacagaggcacttacgcggtaaacattcatgtactaacaactcccggacttaatcacgcgttttctagcttattgagtggaaagttcaaaaagtcagacggtagttatcgaacacatcctcactattcatggatgcagaatatttctattcctaggagtgttggattttatccggatcaagtaaagatttcaaagatgttttctgtcagaaaataccatccaagtcaatatctttacttttgttcatcagacgttccggaaagaggtcctcaggtaggtttagtatctcaattgtctgtcttgagttccattacaaatatactaacgtctgagtatttggatttggaaaagaaaatttgtgagtatatcagatcatattataaagatgatataagttactttgaaacaggatttccaatcactatagaaaatgctctagtcgcatctcttaatccaaatatgatatgtgattttgtaactgactttagacgtagaaaacggatgggattcttcggtaacttggaggtaggtattactttagttagggatcacatgaatgaaattcgcattaatattggagcgggaagattagtcagaccattcttggttgtggataacggagagctcatgatggatgtgtgtccggagttagaaagcagattagacgacatgacattctctgacattcagaaagagtttccgcatgtcatcgaaatggtagatatagaacaatttacttttagtaacgtatgtgaatcggttcaaaaatttagaatgatgtcaaaggatgaaagaaagcaatacgatttatgtgactttcctgccgaatttagagatggatatgtagcatcttcactagtgggaatcaatcacaattctggacccagagctattcttggatgtgctcaagctaaacaagctatctcttgtctgagttcggatatacgaaataaaatagacaatggaattcatttgatgtatccagagaggccaatcgtgattagtaaggctttagaaacttcaaagattgcggctaattgcttcggccaacatgttactatagcattaatgtcgtacaaaggtatcaatcaagaggatggaattatcatcaaaaaacaatttattcagagaggcggtctcgatattgttacagccaagaaacatcaagtagaaattccattggaaaactttaataacaaagaaagagataggtctaacgcctattcaaaattagaaagtaatggattagttagactgaatgctttcttggaatccggagacgctatggcacgaaatatctcatcaagaactcttgaagatgattttgctagagataatcagattagcttcgatgtttccgagaaatataccgatatgtacaaatctcgcgttgaacgagtacaagtagaacttactgacaaagttaaggtacgagtattaaccatgaaagaaagaagacccattctaggagacaaatttaccactagaacgagtcaaaagggaacagtcgcgtatgtcgcggatgaaacggaacttccatacgacgaaaatggtatcacaccagatgtcattattaattctacatccatcttctctagaaaaactatatctatgttgatagaagttattttaacagccgcatattctgctaagccgtacaacaataagggagaaaaccgacctgtctgttttcctagtagtaacgaaacatccatcgatacatatatgcaattcgctaaacaatgttatgagcattcaaatccgaaattgtccgatgaagaattatcggataaaatcttttgtgaaaagattctctatgatcctgaaacggataagccttatgcatccaaagtattttttggaccaatttattacttgcgtctgaggcatttaactcaggacaaggcaaccgttagatgtagaggtaaaaagacgaagctcattagacaggcgaatgagggacgaaaacgtggaggaggtatcaagttcggagaaatggagagagactgtttaatagcgcatggtgcagccaatactattacagaagttttgaaagattcggaagaagattatcaagatgtgtatgtttgtgaaaattgtggagacatagcagcacaaatcaagggtattaatacatgtcttagatgttcaaaacttaatctctctcctctcttaacaaaaattgataccacgcacgtatctaaagtatttcttactcaaatgaacgccagaggcgtaaaagtcaaattagatttcgaacgaaggcctccttcgttttataaaccattagataaagttgatctcaagccgtcttttctggtgtaatattctagtttggtagtagatacatatcaatatcatcaaattcgagatccgaattataaaatgggcgtggattgttaactatagaatcggacgtctgatattcgaaaatctgtggagtttcaggttttggtggaggtgtaactgctacttgggatactgaagtctgatattcagaaagctgtggatgttctggttcggcatccaccgatggtgtcacatcactaatcggttcggtaacgtctgtggatggaggtgctacttctacagaacctgtagcctcagttgtcaacggagatacatttttaatgcgagaaaatgtataatttggtaatggtttcttatgtggatctgaagaagaggtaagatatctactagaaagataccgatcacgttctagttctcttttgtagaacttaactttttctttctccgcatctagttgatattccaacctcttcacgttactacgttcagattccaattcacgttcgcatgggttacctccgcagtttttacgagcgatttcacgttcagccttcatgcgtctctccctctctctatcgagtttatcagagcagtctttctgaaggcgatcgaactccataaatttctccaacgctttgattgtttccatagatttccgaagttcagcttttaggactgtgattctttttctttcgaattcacagctggatgtacaaccgtttccattaccgccatctctaagtttcttttctagatcggcaacatttcatccccatgccttttacattcctcgagtctactgtcgtcgaaatatcgttccagctccttttcgacatcaataactttagcacgttgtctctcaagctctcttttgtagttatctgattccctggcacgtttaagatcttcatgcaattgagtcagctcttaacttcctctcttgcttcttcgtcatagtacgcgcaatcactgtgagatccattgttaccacgtctacactcggcgagctcgcgtttaagagattcaatttcccgtttgtattggtccatgtttccattgctaccaccattagatttacaggctgctagttgtcgttcgagatcagaaatacgggttttcttggaattgatttcgtcgatgtacttggcatcgaaacacttattaagttctttttccaattctacgattttatttctttcgcgagtcaattccctcctgtagtaactatctgttttgtcagattcacgctctctacgtagactttcttgcaagttactaatttgttccctagcacgtccgagtttagttttatatgctgaatagagttctgattcatcctttgagcagatctctagcgatcgtttaagattcctaattctagtctttagcctatttacctcctcagaagatgttccgttaccgttgcgtttacactcgttaagctgtctatcaagatccatgattctatctctaagacgttgcatctctctttccatatcagcattgctttcattattacgtctgcagtcactcaactgtctttcaatatctgagattctatctctaagacgtcgcatctctctctgtttcggcattggtttcattattacgtttacagtcgttcaactgtctttcaagatctgatattctagattggagtctgctaatctctgtagcattttcacggcattcactcagttgtctttcaagatctgaaattttagattggagtctgctaatctctgtaagatttcctcctccgctctcgatgcagtcggtcaacttattctctagttctctaatacgcgaacgcagtgcatcaacttcttgcgtgtcttcctggttgcgtgtacattcatcgagtctagattcgagatctctaacgcgtcgtcgttcttcctcaagttctctgcgtactacagaaagcgtgtccttatcttgttgatatttagcaatttctgattctagagtactgattttgcttacgtagttactaatatttgtcttggccttatcaagatcctccttgtatttgtcgcattccttgatatccctacgaagtctggacagttcccattcgacattacgacgtttatcgatttcagctcggagatcgtcatcgcgttgttttagccacatacgactgagttcaagttctcgttgacaagatccatctacttttccattcctaatagtatccagttccttttctagttctgaacgcatttctcgttccctatcaagcgattctctcaattctcggatagtcttcttatcaatttctaataaatctgaaccatcatctgtcccattttgaatatccctgtgttctttgatctcttttgtaagtcggtcgattctttcggttttataaacagaatccctttccaaagtcctaatcttactgagtttatcactaagttctgcattcaattcggtgagttttctcttggcttcttccaactctgttttaaactctccactatttccgcattcttcctcgcatttatctaaccattcaattagtttattaataactagttggtaatcagcgattcctatagccgttcttgtaattgtgggaacataattaggatcttctaatggattgtatggcttgatagcatcatctttatcattattagggggatggacaaccttaattggttggtcctcatctcctccagtagcgtgtggttcttcaataccagtgttagtaataggcttaggcaaatgcttgtcgtacgcgggcacttcctcatccatcaagtatttataatcgggttctacttcagaatattcttttctaagagacgcgacttcgggagttagtagaagaactctgtttctgtatctatcaacgctggaatcaatactcaagttaaggatagcgaatacctcatcgtcatcatccgtatcttctgaaacaccatcatatgacatttcatgaagtctaacgtattgataaatagaatcagatttagtattaaacagatccttaacctttttagtaaacgcatatgtatattttagatctccagatttcataatatgatcacatgccttaaatgtcagtgcttccatgatataatctggaacactaatgggtgacgaaaaagatacagcaccatatgctacgttgataaataaatctgaaccactaagtagataatgattaatgttaagaaagaggaaatattcagtgtataggtatgtcttggcgtcatatcttgtactaaacacgctaaacagtttgttaatgtgatcaatttccaatagattaattagagcagcgggaataccaacaaacatattaccacatccgtattttctatgaatatcacatatcatgttaaaaaatcttgatagaagagcgaatatctcgtctgacttaatgagtcgtagttcagcagcaacataagtcataactgtaaatagaacatactttcctgtagtgttgattctagactccacatcaacaccattattaaaaatagttttatatacatctttaatctgctctccgttaatcgtcgaacgttctagtatacggaaacactttgatttcttatctgtagttaatgacttagtgatatcacgaagaatattacgaattacatttcttgtttttcttgagagacctgattcagaactcaactcatcgttccatagtttttctacctcagtggcgaaatctttggagtgcttggtacatttttcaataaggttcgtgacctccatttattataaaaaatttattcaaaacttaactacaatcgggtaattataaaatcgtagatctcccatgtggcggaatactaccatctatcgcatgtggatggacagtaggtaatggccatgggaacagtaatgtttgcatatttatctttcttgccagtattactgcatattgtcccaatgtttcgatgtgatgttctaacctatcaactgccgctgtatcacaacaatagtgtccgatgaaattaagattatgatccaatgtgtttaatatatgattatcaagtcttatacgatccgcgtcttttttgacaggatcaggttcttctacaggaagaagtttcggcctcttatgatattcatgtctgggaaacggtggtctagggtgaggctccggtatcggagtgggttttggattataatcatcatcgtctatgacatcatcatcatcttcgacttcgatatttattttgctatcttgatgatgtcctgtatcagttgcattttcagcactcgactgaatattagcgcattcattgtctattattaccatatttctaaacccaaaatgtatgtgttgaacatcagtactatcgttgatgagtcttatagcatgaattcgcttatcgttatcgggtttatcttctgtcaccttagcaattccttttttattaaactctacataatcatatccatttctattgtttgttctaatataaacgagtatagcatcattgctaaatttttcaatagtatcaaaaacagaatatcctaaaccatataatatatattcaggaacactcaaactaaatgtccaggattctcctaaatacgtaaactttaatagtgcgaaatcattcaaaaatctaccacttatagatagatagtacataaatgcgtatagtagtctacctatctctttattatgaaaaccggcattacgatcatatatgtcgtgatatacctgtgatccgtttacgttaaaccataaatacatgggtgatcctataaacatgaatttatttctaattctcagagctatagttaattgaccgtgtaatatttgcttacatgcatacttgatacgcttattaataagatttttatcattgctcgttatttcagaatcgtatatataaggagtaccatcgtgattcttaccagatattatacaaaatactatatataaaatatattgacccacgttagtaatcatataaatgtttaacgttttaaattttgtattcaatgatccattatcatacgctatcatggtcttgtaatattcattctttaaaatataatattgtgttagccattgcattggagctcctaatggagattttctattctcatccattttaggataggctttcataaagtccctaataacttcgtgaataatgtttctatgttttctactgatgcatgtatttgcttcgatttttttatcccatgtttcatctatcatagatttaaacgcagtaatgctcgcaacattaacatcttgaaccgttggtacaattccgttccataaatttataatgttcgccatttatataactcattttttgaatatacttttaattaacaaaagagttaagttactcatatggacgccgtccagtctgaacatcaatctttttagccagagatatcatagccgctcttagagtttcagcgtgattttccaacctaaatagaacttcatcgttgcgtttacaacacttttctatttgttcaaactttgttgttacattagtaatctttttttccaaattagttagccgttgtttgagagtttcctcattgtcgtcttcatcggctttaacaattgcttcgcgtttagcctctggctttttagcagcctttgtagaaaaaaattcagttgctggaattgcaagatcgtcatctccggggaaaagagttccgtccatttaaagtacagattttagaaactgacactctgcgttatttatatttggtacaacacatggattataaatattgatgttaataacatcagaaaatgtaaagtctatacattgttgcatcgtgttaaattttctaatggatctagtattattgggtccaacttctgcctgaaatccaaatatggaagcggatacaaaaccgtttcctggataaaccacacatctccacttttgctttacatcagaaattgtgtcgttgacatcttgaactctcctatctaatgccggtgttccacctatagattttgaatattcgaatgctgcatgagtagcattaaattccttaatattgccataattttcatatattgagtaaccctggataaaaagtaaacacaccgcagccgtcgctaccacaataaaaaaaattgatagagagttcatttataatctattagaagctgacaaaatttttttacacgcatcagacaatgctttaataaatagttcaacatctacttttgtcatatcgaaccgatggtatgattctaacctagaattacatccgaaaaagttgactatgttcatagtcattaagtcattaacaaacaacattccagactctggattataagacgatactgtttcgtcacaattacctaccttaatcatgtgattatgaatattggctattagagcaccttctaagaaatctataatatctttgaaacacgatttaaaatcaaaccacgaatatacttctacgaagaaagttagtttacccataggagaaataactataaatggagatctaaatacaaaatccggatctatgatagttttaacattattatattctctattaaatacctccacatctaaaaatgttaattttgaaactatgtcttcgtttattaccgtacctgaactaaacgctataagctctattgtttgagaactctttaaacgatattcttgaaatacatgtaacaaagtttcctttaactcggtcggtttatctaccatagttacagaatttgtatccttatctataatataataatcaaaatcgtataaagttatataattatcgcgttcagattgggatcttttcaaatagactaaaaaccccatttctctagtaagtatcttatgtatatgtttgtaaaatatcttcatggtgggaatatgctctaccgcagttagccattcctcattgacagcggtagatgtattagacaaaactattccaatgtttaacaagggccattttacgagattattaaatccttgtttgataaatgtagccaatgagggttcgagttcaacgacgattgaattctcttcccgcggatgctgcatgatgaacgacgggatgttgttcgattgatttggaattctttttcgactttttgtttatattaaatattttaaaatttatagcggatagcaattcatgtaccacggataatgtagacgcgtattgcgcatcgatatctttattattagataaatttatcaataaatgtgagaagtttgcctcgttaaggtcttccatttaaatattatataaacatttgtgtttgtatcttattcgtcttttatggaatagttttttactagtaaagctgcaattacacactttgtccgtaaaacataaatataaacaccagcttttatcaatcgttccaaaaagtcgacggcggacatttttaacatggcatctattttaaatacacttaggtttttggaaaaaacatcattttataattgtaacgattcaataactaaagaaaagattaagattaaacataagggaatgtcatttgtattttataagccaaagcattctaccgttgttaaatacttgtctggaggaggtatatatcatgatgatttggttgtattggggaaggtaacaattaataatctaaagatgatgctattttacatggatttatcatatcatggagtgacaagtagtggagcaatttacaaattgggatcgtctatcgatagactttctctaaataggactattgttacaaaagttaataattatgatgatacattttttgacgacgatgattgatcgctattgcacaattttgtttttgtactttctaatatagtgtttaggttctttttcatatgagaatattgatttactaaaatatctatgtttaacttttgttctatgacgtccttatcggcggtatcggtacatatacgtaattcaccttcacaaaatacggagtcttcgataataatagccaatcgattattggatctagctgtctgtatcatattcaacatgtttaatatatcctttcgtttcccctttacaggcatcgatcgtagcatattttccgcgtctgatatggaaatgttaaaactacaaaaatgcgtaatgttagcccgtcctaatattggtacgtgtctataagtttggcatagtagaataatagacgtgtttaaatgccttccaaagtttaagaattctattagagtattgcattttgatagtttatcgcctacatcatcaaaaataagtaaaaagtgtgctgattttttatgattttgtgcgacagcaatacatttttctatgttacttttagttcgtatcagattatattctagagattcctgactactaacgaaattaatatgatttggccaaatgtatccatcataatctgggttataaacgggtgtaaacaagaatatatgtttatattttttaactagtgtagaaaacagagatagtaaatagatagtttttccagatccagatcctcctgttaaaaccattctaaacggcatttttaataaattttctcttgaaaattgtttttcttggaaacaattcataattatatttacagttactaaattaatttgataataaatcaaaatatggaaaactaaggttgttagtagggaggagaacaaagaaggcacatcgtgatataaataacatttattatcatgatgacaccagaaaacgacgaagagcagacatctgtgttctccgctactgtttacggagacaaaattcagggaaagaataaacgcaaacgcgtgattggtctatgtattagaatatctatggttatttcactactatctatgattaccatgtccgcgtttctcatagtgcgcctaaatcaatgcatgtctgctaacgaggctgctattactgacgccgctgttgccgttgctgctgcatcatctactcatagaaaggttgcgtctagcactacacaatatgatcacaaagaaagctgtaatggtttatattaccagggttcttgttatatattacattcagactaccagttattctcggatgctaaagcaaattgcactgcggaatcatcaacactacccaataaatccgatgtcttgactacctggctcattgattatgttgaggatacatggggatctgatggtaatccaattacaaaaactacatccgattatcaagattctgatgtatcacaagaagttagaaagtatttttgtgttaaaacaatgaactaatatttatttttgtacattaataaatgaaatcgcttaatagacaaactgtaagtaggtttaagaagttgtcggtgccggccgctataatgatgatactctcaaccattattagtggcataggaacatttctgcattacaaagaagaactgatgcctagtgcttgcgccaatggatggatacaatacgataaacattgttatttagatactaacattaaaatgtctacagataatgcggtttatcagtgtcgtaaattacgagctagattgcctagacctgatactagacatctgagagtattgtttagtattttttataaagattattgggtaagtttaaaaaagaccaatgataaatggttagatattaataatgataaagatatagatattagtaaattaacaaattttaaacaactaaacagtacgacggatgctgaagcgtgttatatatacaagtctggaaaactggttaaaacagtatgtaaaagtactcaatctgtactatgtgttaaaaaattctacaagtgacaacaaaaaatgaattaataataagtcgttaacgtacgccgccatggacgccgcgtttgttattactccaatgggtgtgttgactataacagatacattgtatgatgatctcgatatctcaatcatggactttataggaccatacattataggtaacataaaaactgtccaaatagatgtacgggatataaaatattccgacatgcaaaaatgctactttagctataagggtaaaatagttcctcaggattctaatgatttggctagattcaacatttatagcatttgtgccgcatacagatcaaaaaataccatcatcatagcatgcgactatgatatcatgttagatatagaagataaacatcagccattttatctattcccatctattgatgtttttaacgctacaatcatagaagcgtataacctgtatacagctggagattatcatctaatcatcaatccttcagataatctgaaaatgaaattgtcgtttaattcttcattctgcatatcagacggcaatggatggatcataattgatgggaaatgcaatagtaattttttatcataaaagttgtaaagtaaataataaaacaataaatattgaactagtagtacgtatattgagcaatcagaaatgatgctggtacctcttatcacggtgaccgtagttgcgggaacaatattagtatgttatatattatatatttgtaggaaaaagatacgtactgtctataatgacaataaaattatcatgacaaaattaaaaaagataaagagttctaattccagcaaatctagtaaatcaactgatagcgaatcagactgggaggatcactgtagtgctatggaacaaaacaatgacgtagataatatttctaggaatgagatattggacgatgatagcttcgctggtagtttaatatgggataacgaatccaatgttatggcgcctagcacagaacacatttacgatagtgttgctggaagcacgctgctaataaataatgatcgtaatgaacagactatttatcagaacactacagtagtaattaatgaaacggagactgttgaagtacttaatgaagataccaaacagaatcctaactattcatccaatcctttcgtaaattataataaaaccagtatttgtagcaagtcaaatccgtttattacagaacttaacaataaatttagtgagaataatccgtttagacgagcacatagcgatgattatcttaataagcaagaacaagatcatgaacacgatgatatagaatcatcggtcgtatcattggtgtgattagtttcctttttataaaattgaagtaatatttagtattattgctgccgtcacgttgtacaaatggagatattccctgtattcggcatttctaaaattagcaattttattgctaataatgactgtagatattatatagatacagaacatcaaaaaattatatctgatgagatcaatagacagatggatgaaacggtacttcttaccaacatcttaagcgtagaagttgtaaatgacaatgagatgtaccatcttattcctcatagattatcgacgattatactctgtattagttctgtcggaggatgtgttatctctatagataatgacatcaatggcaaaaatattctaacctttcccattgatcatgctgtaatcatatccccactgagtaaatgtgtcgtagttagcaagggtcctacaaccatattggttgttaaagcggatatacctagcaaacgattggtaacatcgtttacaaacgacatactatatgtaaacaatctgtcactgattaattatttgccgttgtctgtattcattattagacgagtcaccgactatttggatagacacatatgcgatcagatatttgctaataataagtggtattcccttataaccatcgacgataagcaatatcctattccatcaaactgtataggtatgtcctctgccaagtacataaattctagcatcgagcaagatactttaatccatgtttgtaacctcgagcatccgttcgactcagtatacaaaaaaatgcagtcgtacaattctctacctatcaaggaacaaatattgtacggtagaattgataatataaatatgagcattagtatttctgtggattaatagatttctagtatggggatcattaatcatctctaatctctaaatacctcataaaacgaaaaaaaagctattatcaaatactgtacggaatggattcattctcttctctttttatgaaactctgttgtatatctactgataaaactggaagcaaaaaatctgatagaaagaataagaataagatcaaggattatatggaacacgattattataaaataacaatagttcctggttcctcttccacgtctactagctcgtggtattatacacatgcctagtaatagtctctttgcgttgacggaaagcagactagaaataacaggctaaaatgttcagacaccataatagttcccaacccagataataacagagttccatcaacacattcctttaaactcaatcccaaacccaaaaccgttaaaatgtatccggccaattgatagtagataatgaggtgtacagcgcatgataatttacacagtaaccaaaatgaaaatactttagtaattataagaaatatagacggtaatgtcatcatcaacaatccgataatatgcctgagagtaaacattgacggataaaacaaaaatgctccgcataactctatcatggcaataacacaaccaaatacttgtaagattcctaaattagtagaaaatacaacgaatatcgatgtataagtgatctcgagaaataataagaataaagtaatgcccgtaaagataaacatcaacattgtttggtaatcattaaaccaattagtatgaagttgaactaatttcacagtagattttattccagtgttatcctcgcatgtataagtacctggtaagatatctttatattccataatcaatgagacatcactatctgataacgaatgaagtctagcactagtatgccatttacttaatattgtcgtcttggaagttttattataagttaaaatatcatggttatccaatttccatctaatatactttgtcggattatctatagtacacggaataatgatggtatcattacatgctgtatactctatggtctttgtagttgttataacaaccaacgtatagaggtatatcaacgatattctaactcttgacattttttatttatttaaaatgatacctttgttatttattttattctattttgctaacggtattgaatggcataagtttgaaacgagtgaagaaataatttctacttacttattagacgacgtattatacacgggtgttaatggggcggtatacacattttcaaataataaactaaacaaaactggtttaactaataataattatataacaacatctataaaagtagaggatgcggataaggatacattagtatgcggaaccaataacggaaatcccaaatgttggaaaatagacggttcagacgacccaaaacatagaggtagaggatacgctccttatcaaaatagcaaagtaacgataatcagtcacaacggatgtgtactatctgacataaacatatcaaaagaaggaattaaacgatggagaagatttgacggaccatgtggttatgatttatacacggcggataacgtaattccaaaagatggtttacgaggagcattcgtcgataaagatggtacttatgacaaagtttacattcttttcactgatactatcggctcaaagagaattgtcaaaattccgtatatagcacaaatgtgcctaaacgacgaaggtggtccatcatcattgtctagtcatagatggtcgacgtttctcaaagtcgaattagaatgtgatatcgacggaagaagttatagacaaattattcattctagaactataaaaacagataatgatacgatactatatgtattcttcgatagtccttattccaagtccgcattatgtacctattctatgaataccattaaacaatctttttctacgtcaaaattggaaggatatacaaagcaattgccgtctccagctcctggtatatgtttaccagctggaaaagttgttccacataccacgtttgaagtcatagaaaaatataatgtactagatgatattataaagcctttatctaaccaacctatcttcgaaggaccgtctggtgttaaatggttcgatataaaggagaaggaaaatgaacatcgggaatatagaatatacttcataaaagaaaattctatatattcgttcgatacaaaatctaaacaaactcgtagctcgcaagtcgatgcgcgactattttcagtaatggtaacttcgaaaccgttatttatagcagatatagggataggagtaggaatgccacaaatgaaaaaaatacttaaaatgtaatcttaattcgagtacaccacacgacaatgaacaaacataagacagattatgctggttatgcttgctgcgtaatatgcggtctaattgtcggaattatttttacagcgacactattaaaagttgtagaacgtaaattagttcatacaccatcaatagataaaacgataaaagatgcatatattagagaagattgtcctactgactggataagctataataataaatgtatccatttatctactgatcgaaaaacctgggaggaaggacgtaatgcatgcaaagctctaaattcaaattcggatctaattaagatagagactccaaacgagttaagttttttaagaagccttagacgaggctattgggtaggagaatccgaaatattaaaccagacaaccccatataattttatagctaagaatgccacgaagaatggaactaaaaaacggaaatatatttgtagcacaacgaatactcccaaactgcattcgtgttacactatataacaattacactacatttttatcataccactacttcggttagatgttttagaaaaaaataaatatcgccgtaccgttcttgtttttataaaaataacaattaacaattatcaaattttttctttaatattttacgtggttgaccattcttggtggtaaaataatctcttagtgttggaatggaatgctgtttaatgtttccacactcatcgtatattttgacgtatgtagtcacatcgtttacgcaatagtcagactgtagttctatcatgcttcctacatcagaaggaggaacagttttaaagtctcttggttttaatctattaccgttagttttcatgaaatcctttgttttatccacttcacattttaaataaatgtccactatacattcttttgttaattttactagatcgtcatgggtcatagaatttataggttccgtagtccatggatccaaactagcaaacttcgcgtatacggtatcgcgattagtgtatacaccaactgtatgaaaattaagaaaacagtttaataaatcaacagaaatatttaatcctccgtttgatacagatgcgccatatttatggatttcggattcacacgttgtttgtctgaggtgttcgtctagtgttgcttctacgtaaacttcgattcccatatattctttattgtcagaatcgcataccgatttatcatcatacactgtttgaaaactaaatggtatacacatcaaaataataaataataacgagtacattctgcaatattgttatcgtaattggaaaaatagtgttcgagtgagttggattatgtgagtattggattgtatattttattttatattttgtaataagaataaaatgctaatgtcaagtttattccaatagatgtcttattaaaaacatatataataaataacaatggctgaatggcataaaattatcgaggatatctcaaaaaataataagttcgaggatgccgccatcgttgattacaagactacaaagaatgttctagctgctattcctaacagaacatttgccaagattaatccgggtgaaattattcctctcatcactaatcgtaatattctaaaacctcttattggtcagaaatattgtattgtatatactaactctctaatggatgagaacacgtatgctatggagttgcttactgggtacgcccctgtatctccgatcgttatagcgagaactcataccgcacttatatttttgatgggtaagccaacaacatccagacgtgacgtgtatagaacgtgtagagatcacgctacccgtgtacgtgcaactggtaattaaaataaaaagtaatattcatatgtagtgtcaattttaaatgatgatgatgaaatggataatatccatattgacgatgtcaataatgccggtattggcatacagttcatcgatttttagatttcattcagaggatgtggaattatgttatgggcatttgtattttgataggatctataatgtagtaaatataaaatataatccgcatattccatatagatataattttattaatcgcacgttaaccgtagatgaactagacgataatgtcttttttacacatggttattttttaaaacacaaatatggttcacttaatcctagtttgattgtctcattatcaggaaacttaaaatataatgatatacaatgctcagtaaatgtatcgtgtctcattaaaaatttggcaacgagtacatctactatattaacatctaaacataagacttattctctacatcggtccacgtgtattactataataggatacgattctattatatggtataaagatataaatgacaagtataatgacatctatgattttactgcaatatgtatgctaatagcgtctacattgatagtgaccatatacgtgtttaaaaaaataaaaatgaactcttaattatgctatgctattagaaatggataaaatcaaaattacggttgattcaaaaattggtaatgttgttaccatatcgtataacttggaaaagataactattgatgtcacacctaaaaagaaaaaagaaaaggatgtattattagcgcaatcagttgctgtcgaagaggcaaaagatgtcaaggtagaagaaaaaaatattatcgatattgaagatgacgatgatatggatgtagaaagcgcgtaatactatctataaaaataagtatataataaatactttttatttacggtactcttactgtgtagtggtgataccctactcgattatttttttaaaaaaatacttattctgattcttctaaccatttccgtgttcgttcgaatgccacatcgacgtcaaagataggggagtagttgaaatctagttctgcattgttggtacgcacctcaaatgtagtgttggatatcttcaacgtatagttgttgagtagtgatggttttctaaatagaattctcttcatatcattcttgcacgcgtacatttttagcatccatcttggaatcctagatccttgttctattcccaatggtttcatcaatagaagattaaacatatcgtacgaacacgatggagagtaatcgtagcaaaagtaagcatttcctttaatcttagatcccggatactggatatattttgcagccaacacgtgcatccatgcagcatttcctacatatacccggctatgcaccgcgtcatcatcgactgtacgatacataatgttaccgtgttgcttacattgctcgtaaaagactttcgtcaatttgtctccttctccgtaaattctagtgggtcttaggcaacaagtatacaattttgctccattcatgattacggaattattggctttcataaccagttgctcggccatacgtttactttttgcgtatacatgtcctggtgatatatcataaagggtatgctcatggccgatgaatggatcaccgtgtttattgggtcctattgcttccatgctactagtatagatcaaatacttgattcctaggtccacacaagctgccaaaatagtctgtgttccataatagtttactttcatgatttcattatcggtgtattttccaaatacatccactagagcagccgtatgaataatcagatttaccccatctagcgcttctctcaccttatcaaagtcgtttatatcacattgtatatagtttataaccttaactttcgaggttattggttgtggatcttctacaatatctatgactctgatttcttgaacatcatctgcactaattaacagttttactatatacctgcctagaaatccggcaccaccagtaaccgcgtacacggccattgctgccactcataatatcagactacttattctattttactaaataatggctgtttgtataatagaccacgataatatcagaggagttatttactttgaaccagtccatggaaaagataaagttttaggatcagttattggattaaaatccggaacgtatagtttgataattcatcgttacggagatattagtcaaggatgtgattccataggcagtccagaaatatttatcggtaacatctttgtaaacagatatggtgtagcatatgtttatttagatacagatgtaaatatatttacaattattggaaaggcgttatctatttcaaaaaatgatcagagattagcgtgtggagttattggtatttcttacataaatgaaaagataatacattttcttacaattaacgagaatggcgtttgatatatcagttaatgcgtctaaaacaataaatgcattagtttacttttctactcagcaaaataaattagtcatacgtaatgaagttaatgatacacactacactgtcgaatttgatagggacaaagtagttgacacgtttatttcatataatagacataatgacaccatagagataagaggggtgcttccagaggaaactaatattggttgcgcggttagtatgacttacttgtataataagtatagttttaaactgattttagcagaatatataagacacagaaatactatatccggcaatatttattcggcattgatgacactagatgatttggctattaaacagtatggagacattgatctattatttaatgagaaacttaaagtagactccgattcgggactatttgactttgtcaactttgtaaaggatatgatatgttgtgattctagaatagtagtagctctatctagtctagtatctaaacattgggaattgacaaataaaaaatataggtgtatggcattagccgaacatatatctgatagtattccaatatctgagctatctagactacgatacaatctatgtaagtatctacgcggacacactgagagcatagaggataaatttgattattttgaagacgatgattcgtctacatgttctgccgtaaccgacagggaaacggatgtataattttttttatagcgtgaaggatatgataaaaaatataattgttgtatttatcccattccaatcaccttatatgattctgtaacacaataaaggagtcttatagatgtatagaggtcagatactggtttgataaactgtttattccacataagtatgtttgactttatggttagacccgcatactttaacaaatcactgaaaattggagttaggtattgacctctcagaatcagttgccgttctggaacattaaatgtattttttatgatatactccaacgcatttatgtgggcatacaacaagtcattactaatggaatattccaagagttttagttgtctagtatttaacaagagaagagatttcaacagactgtttatgaactcgaatgccgcctcattgtcgcttatattgatgatgtcgaattctcccaatatcatcaccgatgagtagctcatcttgttatcgggatccaagttttctaaagatgtcattaaaccctcgatcatgaatggatttatcatcatcgtttttatgttggacatgagcttagtccgtttgtccacatctatagacgacgatttctgaattatttcatatatccctctctttaactccaggaacttgtcaggatggtctactttaatatgttctcgtctaagagatgaaaatctttggatggttgcacgcgacttttctctaaaggatgacgttgcccaagatcctctcttaaatgaatccatcttatccttggacaagatggacagtctattttccttagatggtttaatatttttgttacccatgatctataaaggtagacctaatcgtctcggatgacctatatatttattttcagttttattatacgcataaattgtaaaaaatatgttaggtttacaaaaatgtctcgtggggcattaatcgtttttgaaggattggacaaatctggaaaaacaacacaatgtatgaacatcatggaatcaataccggcaaacacgataaaatatcttaactttcctcagagatccactgtcactggaaagatgatagatgactatctaactcgtaaaaaaacctataatgatcatatagttaatctattattttgtgcaaatagatgggagtttgcatcttttatacaagaacaactagaacagggaattactttaatagttgatagatacgcgttctctggagtagcgtatgccgccgctaaaggcgcgtcaatgactctcagtaagagttatgaatctggattgcctaaacccgacttagttatattcttggaatctggtagcaaagaaattaatagaaacgtcggtgaggaaatttatgaagatgttacattccaacaaaaggtattacaagaatataaaaaaatgattgaagaaggagatattcattggcaaattatttcttctgaattcgaggaagatgtaaagaaggagttgattaagaatatagttatagaggctatacacacggttactggaccagtggggcaactgtggatgtaatagtgaaattacattttttataaatagatgttagtacagtgttataaatggatgaagcatattactctggcaacttggaatcagtactcggatacgtgtccgatatgcataccgaactcgtatcaatatctcaattagttattgccaagatagaaactatagataatgatatattaaacaaggacattgtaaattttatcatgtgtagatcaaacttggataatccatttatctctttcctagatactgtatatactattatagatcaagagaactatcagaccgagttgattaattcattagacgacaatgaaattatcgattgtatagttaataagtttatgagcttttataaggataacctagaaaatatagtagatgctatcatcactctaaaatatataatgaataatccagattttaaaactacgtatgccgaagtactcggttccagaatagccgatatagatattaaacaagtgatacgtaagaatatactacaattgtctaatgatatccgcgaacgatatttgtgaaaatattaaaaaaaaatactttttttattaaatgacgtcgcttcgcgaatttagaaaattatgctgtgatatatatcacgcatcaggatataaagaaaaatctaaattaattagagactttataacagatagggatgataaatatttgatcattaagctattgcttcccggattagacgatagaatttataacatgaacgataaacaaattataaaattatatagtataatatttaaacaatctcaggaagatatgctacaagatttaggatacggatatataggagacactattaggactttcttcaaagagaacacagaaatccgtccacgagataaaagcattttaactttagaagacgtggatagtttcttaactacgttatcatccgtaactaaagaatcgcatcaaataaaattattgactgatattgcatccgtttgtacatgtaatgatttaaaatgtgtagtcatgcttattgataaagatctaaaaattaaagcgggtcctcggtacgtacttaacgctattagtcctcatgcctatgatgtgtttagaaaatctaataacttgaaagagataatagaaaattcatctaaacaaaatctagactctatatctatttctgttatgactccaattaatcccatgttagcggaatcgtgtgattctgtcaataaggcgtttaaaaaatttccatcaggaatgtttgcggaagtcaaatacgatggtgaaagagtacaagttcataaaaataataacgagtttgccttctttagtagaaacatgaaaccagtactctctcataaagtggattatctcaaagaatacataccgaaagcatttaaaaaagctacgtctatcgtattggattctgaaattgttcttgtagacgaacataatgtaccgctcccgtttggaagtttaggtatacacaaaaagaaagaatataaaaactctaacatgtgtttgttcgtgtttgactgtttgtactttgatggattcgatatgacggacattccattgtacgaacgaagatcttttctcaaagatgttatggttgaaatacccaatagaatagtattctcagagttgacgaatattagtaacgagtctcagttaactgacgtattggatgatgcactaacgagaaaattagaaggattggtcttaaaagatattaatggagtatacgaaccgggaaagagaagatggttaaaaataaagcgagactatttgaacgagggttccatggcagattctgccgatttagtagtactaggtgcctactatggtaaaggagcaaagggtggtatcatggcagtctttctaatgggttgttacgacgatgaatccagtaaatggaagacggttaccaagtgttcaggacacgatgataatacgttaagggagttgcaagaccaattaaagatgattaaaattaacaaggatcccaaaaaaattccagagtggttagtagttaataaaatctatattcccgattttgtagtagaggatccgaaacaatctcagatatgggaaatttcaggagcagagtttacatcttccaagtcccataccgcaaatggaatatccattagatttcctagatttactaggataagagaggataaaacgtggaaagaatctactcatctaaacgatttagtaaacttgactaaatcttaatagttacatacaaactgaaaattaaaataacactatttagttggtggtcgccatggatggtgttattgtatactgtctaaacgcgctagtaaaacatggcgaggaaataaatcatataaaaaatgatttcatgattaaaccatgttgtgaaagagtttgtgaaaaagtcaagaacgttcacattggcggacaatctaaaaacaatacagtgattgcagatttgccatatatggataatgcggtatccgatgtatgcaattcactgtataaaaagaatgtatcaagaatatccagatttgctaatttgataaagatagatgacgatgacaagactcctactggtgtatataattattttaaacctaaagatgccattcctgttatcatatctataggaaaggataaagatgtctgtgaactattaatctcatcagacatatcgtgtgcatgcgtggagttaaattcatatcacgtagccattcttcccatggatgtttccttttttaccaaaggaaatgcatcattgattattctcctgtttgatttctctatcgatgcggcacctctcttaagaagtgtaaccgataataatgttattatatctagacaccagcgtctacatgacgagcttccgagttccaattggttcaagttttacataagtataaagtccgactattgttctatattatatatggttgttgatggatctgtgatgcatgcgatagctgataatagaactcacgcaattattagcaaaaatatattagacaatactacgattaacgatgagtgtagatgctgttattttgaaccacagattaggattcttgatagagatgagatgctcaatggatcatcgtgtgatatgaacagacattgtattatgatgaatttacctgatgtaggcgaatttggatctagtatgttggggaaatatgaacctgacatgattaagattgctctttcggtggctggtaatttaataagaaatcgagactacattcccgggagacgaggatatagctactacgtttacggtatagcctctagataatttttttaagcacgaaataaaaaacataattttaaaccaatctatttcatactattttgtgtgatcaccatggacataaagatagatattagtatttctggtgataaatttacggtgactactaggagggaaaatgaagaaagaaaaaaatatctacctctccaaaaagaaaaaactactgatgttatcaaacctgattatcttgagtacgatgacttgttagatagagatgagatgtttactattctagaggaatattttatgtacagaggtctattaggcctcagaataaaatatggacgactctttaacgaaattaaaaaattcgacaatgatgcggaagaacaattcggtactatagaagaactcaagcagaaacttagattaaattctgaagagggagcagataactttatagattatataaaggtacaaaaacaggatatcgtcaaacttactgtatacgattgcatatctatgataggattgtgtgcatgcgtggtagatgtttggagaaatgagaaactgttttctagatggaaatattgtttacgagcgattaaactgtttattaatgatcacatgcttgataagataaaatctatactgcagaatagactagtatatgtggaaatgtcatagaaagttaaaagttaatgagagcaaaaatatataaggttgtattccatatttgttattttttctgtaatagttaaaaaatacattcgatggtctatctatcagattattatgtgttataaggtactttttctcataataaactagagtatgagtaagatagtgtttttcaaaacatataaatctaaaattgatggatgagatatacagctattaatttcgaaaatatattttaatctgataactttaaacatggatttttgatggtggtttaacgttttaaaaaaagattttgttattgtagtatatgataatattaaaagatggatataaagaatttgctgactgcatgtactattttttacattactacattggctacggcagatatacctacttcgtcactgccacacgctccggtaaacggggcatgtgacgagggagaatatcttgataagaggcataatcaatgttgtaatcagtgtccacctggagaatttgccaaggtcagatgtaatggtaacgataacacaaaatgtgaacgctgcccacctcatacatataccgcaatccccaattactctaatggatgtcatcaatgtagaaaatgcccaacaggatcatttgataaggtaaagtgtaccggaacacagaacagtaaatgttcgtgtcttcctggttggtattgcgctactgattcttcacagactgaagattgtcgagattgtataccaaaaaggagatgtccatgcggatactttggtggaatagatgaacaaggaaatcctatttgtaaatcgtgttgtgttggtgaatattgcgactacctacgtaattatagacttgatccatttcctccatgcaaactatctaaatgtaattaattatgattttgatgataatgttaccatacattatatcgctacttggttagtgtattattcagtatgaagacctattaataattacttatcttttgacgatcttgttataattataatataaaaacttatggcatagtaacttataattgctgacgcgataaattcgtaataatctgttttgttcaaaggaatctacaggcataaaaataaaaatataatttataatatactcttacagcgcgccatcatgaataacagcagtgaattgattgctgttattaatggatttagaaatagtggacgattttgtgatattagtatagttattaatgatgaaatgataaacgctcacagactcatcctatctggagcctccgaatatttttccattctgttttccaataattttatcgattctaatgaatacgaagttaatctaagtcatttagattatcaaagcgtaaacgatttgatcgattacatttatgggatacctttgagcctaactaacgataacgtgaaatatattctttcaaccgctgattttttacaaattggatctgccattactgagtgcgaaaaatacatacttaaaaatctttgttctagaaactgtatcgatttctacatatacgctgataaatataataacaagaaaatagaatcagcgtcgtttaacacaatattacaaaatattttgagactcatcaacgatgaaaactttaaatacttaacagaggaatcaatgataaaaattttaagcgatgatatgttaaatataaaaaatgaggatttcgccccactaattctcattaaatggttagagagtactcaacaaccatgcaccgtcgagttacttaaatgcctcagaatatcattgctttccccacaagttataaaatcactttatagtcatcgactggttagttcaatctacgaatgtataacattcttaaacaatatagcattcttggatgaatcatttcctagataccatagcatcgagttgatatctatcggtataagtaattcgcatgataagatttccataaactgctacaatcataaaaaaaatacatgggaaatgatatcttcacgtagatataggtgtagtttcgcagtggccgtcctggataatattatttatatgatgggtggatatgatcagtccccgtatagaagttcaaaggttatagcgtacaatacatgtacaaattcttggatatatgatataccagagctaaaatatcctcgttctaattgtgggggactggctgatgacgaatacatttattgtataggcggcatacgcgatcaggattcatcgttgacatctagtattgatagatggaagccatcaaaaccatattggcagaagtatgctaaaatgcgcgaaccaaaatgtgatatgggggttgcgatgttaaacggattaatatatgttataggtggaatcgttaaaggtgacacgtgtaccgacgcactagagagtttatcagaagatggatggatgaagcatcaacgtcttccaataaaaatgtccaatatgtcgacgattgttcatgatggcaagatttatatatctggaggttacaacaatagtagtgtagttaatgtaatatcgaatttagtccttagctataattcgatatatgatgaatggaccaaattatcatcattaaacattcctagaattaatcccgctctatggtcagcgcataataaattatatgtaggaggaggaatatctgatgatgttcgaactaatacatctgaaacatacgacaaagaaaaagattgttggacattggataatggtcacgtgttaccacgcaattatataatgtataaatgcgaaccgattaaacataaatatccattggaaaaaacacagtacacgaatgattttctaaagtatttggaaagttttataggtagttgatagaacaaaatacataattttgtaaaaataaatcactttttatactaatatgacacgattaccaatacttttgttactaatatcattagtatacgctacaccttttcctcagacatctaaaaaaataggtgatgatgcaactctatcatgtaatcgaaataatacaaatgactacgttgttatgagtgcttggtataaggagcccaattccattattcttttagctgctaaaagcgacgtcttgtattttgataattataccaaggataaaatatcttacgactctccatacgatgatctagttacaactatcacaattaaatcattgactgctagagatgccggtacttatgtatgtgcattctttatgacatcgcctacaaatgacactgataaagtagattatgaagaatactccacagagttgattgtaaatacagatagtgaatcgactatagacataatactatctggatctacacattcaccggaaactagttctgagaaacctgattatatagataattctaattgctcgtcggtattcgaaatcgcgactccggaaccaattactgataatgtagaagatcatacagacaccgtcacatacactagtgatagcattaatacagtaagtgcatcatctggagaatccacaacagacgagactccggaaccaattactgataaagaagatcatacagtcacagacactgtctcatacactacagtaagtacatcatctggaattgtcactactaaatcaaccaccgatgatacgtacaatgataatgatacagtaccaccaactactgtaggcggtagtacaacctctattagcaattataaaaccaaggactttgtagaaatatttggtattaccgcattaattatattgtcggccgtggcaatattctgtattacgtattatatatgtaataaacgttcacgtaaatacaaaacagagaacaaagtctagatttttgacttacataaatgtctgggatagtaaaatctatcatattgagcgggccatctggtttaggaaagacagccatagccaaaagactatgggaatatatttggatttgtggtgtcccataccactagatttcctcgtcctatggaacgagaaggtgtcgattaccattacgttaacagagaggccatctggaagggaatagccgccggaaactttctagaacatactgagtttttaggaaatatttacggaacttctaaaactgctgtgaatacagcggctattaataatcgtatttgtgtgatggatctaaacatcgatggcgttagaagtcttaaaaatacgtacctaatgccttactcggtgtatataagacctacctctcttaaaatggttgagaccaagcttcgttgtagaaacactgaagcggatgatgagattcatcgtcgtgtgatgttggcaaaaactgacatggatgaggcaggtgaagccggtctattcgacactattatcattgaagatgatgtgaatttagcatatagtaagttaattcagatactacaggaccgtattagaatgtattttaacactaattagagacttaagacttaaaacttgataattaataatataactcgtttttatatgtggctatttcaacgtctaatgtattagttaaatattaaaacttaccacgtaaaacttaaaatttaaaatgatatttcattgacagatagatcacacattatgaactttcaaggacttgtgttaactgacaattgcaaaaatcaatgggtcgttggaccattaataggaaaaggtggatttggtagtatttatactactaatgacaataattatgtagtaaaaatagagcccaaagctaacggatcattatttaccgaacaggcattttatactagagtacttaaaccatccgttatcgaagaatggaaaaaatctcacaatataaagcacgtaggtcttatcacgtgcaaggcatttggtctatacaaatccattaatgtggaatatcgattcttggtaattaatagattaggtgcagatctagatgcggtgatcagagccaataataatagactaccaaaaaggtcggtgatgttgatcggaatcgaaatcttaaataccatacaatttatgcacgagcaaggatattctcacggagatattaaagcgagtaatatagtcttggatcaaatagataagaataaattatatctagtggattacggattggtttctaaattcatgtctaatggcgaacatgttccatttataagaaatccaaataaaatggataacggtactctagaatttacacctatagattcgcataaaggatacgttgtatctagacgtggagatctagaaacacttggatattgtatgattagatggttgggaggtatcttgccatggactaagatatctgaaacaaagaattgtgcattagtaagtgccacaaaacagaaatatgttaataatactgcgactttgttaatgaccagtttgcaatatgaacctagagaattgctgcaatatattaccatggtaaactctttgacatattttgaggaacccaattacgacaagtttcggcacatattaatgcagggtgtatattattaagtgtggtgtttggtcgataaaaattaaaaaataacttaatttattattgatctcgtgtgtacaaccgaaatcatggcgatgttttacgcacacgctctcggtgggtacgacgagaatcttcatgcctttcctggaatatcatcgactgttgccaatgatgtcaggaaatattctgttgtgtcagtttataataacaagtatgacattgtaaaagacaaatatatgtggtgttacagtcaggtgaacaagagatatattggagcactgctgcctatgtttgagtgcaatgaatatctacaaattggaaatccgatccatgatcaagaaggaaatcaaatctctatcatcacatatcgccacaaaaactactatgctctaagcggaatcgggtacgagagtctagacttgtgtttggaaggagtagggattcatcatcacgtacttgaaacaggaaacgctgtatatggaaaagttcaacatgattattctactatcaaagagaaggccaaagaaatgagtgcacttagtccaggacctatcatcgattaccacgtctggataggagattgtatctgtcaagttactgctgtggacgtacatggaaaggaaattatgaaaatgagattcaaaaagggtgcggtgcttccgatcccaaatctggtaaaagttaaacttggggagaatgatacagaaaatctttcttctactatatcggcgacaccatcgaggtaaccacctctctggaagacagcgtgaataatgtactcatgaaacgtttggaaactatacgccatatgtggtctgttgtatatgatcattttgatattgtgaatggtaaagaatgctgttatgtgcatacgcatttgtctaatcaaaatcttataccgagtactgtaaaaacaaatttgtacatgaagactatgggatcatgcattcaaatggattccatggaagctctagagtatcttagcgaactgaaggaatcaggtggatggagtcccagaccagaaatgcaggaatttgaatatccagatggagtggaagacactgaatcaattgagagattggtagaggagttcttcaatagatcagaacttcaggctggtgaatcagtcaaatttggtaattctattaatgttaaacatacatctgtttcagctaagcaactaagaacacgtatacggcagcagcttccttctatactctcatcttttaccaacacaaagggtggatatttgttcattggagttgataataatacacacaaagtatttggattcacggtgggttacgactacctcagactgatagagaatgatatagaaaagcatatcaaaagactttgtgttgtgtatttctgtgagaagaaagaggacatcaagtacgcgtgtcgattcatcaaggtatataaacctggggatgaggctacctcgacatacgtgtgcgctatcaaagtggaaagatgctgttgtgctgtgtttgcagattggccagaatcatggtatatggatactaatggtatcaagaagtattctccagatgaatgggtgtcacatataaaattttaattaatgtaactatagagaacaaataataaggttgtaatatcatatagacaataactaacaattaattagtaactgttatctcttttttaattaaccaactaactatatacctattaatacatcgtaattatagttcttaacatctattaatcattaattcgcttctttaattttttataaactaacattgttaattgaaaagggataacatgttacagaatataaattatatatggatttttttaaaaaggaaatacttgactggagtatatatttatctcttcattatatagcacgcgtgttttccaatttttccacatcccatataatacaggattataatctcgttcgaacatacgagaaagtggataaaacaatagttgattttttatctaggttgccaaatttattccatattttagaatatggggaaaatattctacatatttattctatggatgatgctaatacgaatattataattttttttctagatagagtattaaatattaataagaacgggtcatttatacacaatctcgggttatcatcatccattaatataaaagaatatgtatatcaattagttaataatgatcatccagataataggataagactaatgcttgaaaatggacgtagaacaagacattttttgtcctatatatcagatacagttaatatctatatatgtattttaataaatcatggattttatatagatgccgaagacagttacggttgtacattattacatagatgtatatatcactataagaaatcagaatcagaatcatacaatgaattaattaagatattgttaaataatggatcagatgtagataaaaaagatacgtacggaaacacaccttttatcctattatgtaaacacgatatcaacaacgtggaattgtttgagatatgtttagagaatgctaatatagactctgtagactttaatagatatacacctcttcattatgtctcatgtcgtaataaatatgattttgtaaagttattaatttctaaaggagcaaatgttaatgcgcgtaataaattcggaactactccattttattgtggaattatacacggtatctcgcttataaaactatatttggaatcagacacagagttagaaatagataatgaacatatagttcgtcatttaataatttttgatgctgttgaatctttagattatctattatccagaggagttattgatattaactatcgtactatatacaacgaaacatctatttacgacgctgtcagttataatgcgtataatacgttggtctatctattaaacaaaaatggtgattttgagacgattactactagtggatgtacatgtatttcggaagcagtcgcaaacaacaacaaaataataatggaagtactattgtctaaacgaccatctttgaaaattatgatacagtctatgatagcaattactaaacataaacagcataatgcagatttattgaaaatgtgtataaaatatactgcgtgtatgaccgattatgatactcttatagatgtacagtcgctacagcaatataaatggtatattttaagatgtttcgatgaaatagatatcatgaagagatgttatataaaaaataaaactgtattccaattagttttttgtatcaaagacattaatactttaatgagatacggtaaacatccttctttcgtgaaatgcactagtctcgacgtatacggaagtcgtgtacgtaatatcatagcatctattagatatcgtcagagattaattagtctattatccaagaagctggatcctggagataaatggtcgtgttttcctaacgaaataaaatataaaatattggaaaactttaacgataacgaactatccacatatctaaaaatcttataaacattattaaaatataaaatctaagtaggataaaatcacactacatcattgtttccttttagtgctcgacagtgtatactatttttaacgctcataaataaaaatgaaaacgatttccgttgttacgttgttatgcgtactacctgctgttgtttattcaacatgtactgtacccactatgaataacgctaaattaacgtctaccgaaacatcgtttaatgataaccagaaagttacgtttacatgtgatcagggatatcattctttggatccaaatgctgtctgtgaaacagataaatggaaatacgaaaatccatgcaaaaaaatgtgcacagtttctgattatgtctctgaactatataataaaccgctatacgaagtgaattccaccatgacactaagttgcaacggcgaaacaaaatattttcgttgcgaagaaaaaaatggaaatacttcttggaatgatactgttacgtgtcctaatgcggaatgtcaacctcttcaattagaacacggatcgtgtcaaccagttaaagaaaaatactcatttggggaatatatgactatcaactgtgatgttggatatgaggttattggtgcttcgtacataagttgtacagctaattcttggaatgttattccatcatgtcaacaaaaatgtgatatgccgtctctatctaacggattaatttccggatctacattttctatcggtggcgttatacatcttagttgtaaaagtggttttacactaacggggtctccatcatccacatgtatcgacggtaaatggaatcccatactcccaatatgtgtacgaactaacgaaaaatttgatccagtggatgatggtcccgacgatgagacagatttgagcaaactctcgaaagacgttgtacaatatgaacaagaaatagaatcgttagaagcaacttatcatataatcatagtggcgttgacaattatgggcgtcatatttttaatctccgttatagtattagtttgttcctgtgacaaaaataatgaccaatataagttccataaattgctaccgtaaatataaatccgttaaaataattaataatttaataacaaacaagtatcaaaagattaaagacttatagctagaatcaattgagatgtcttcttcagtggatgttgatatctacgatgccgttagagcatttttactcaggcactattataacaagagatttattgtgtatggaagaagtaacgccatattacataatatatacaggctatttacaagatgcgccgttataccgttcgatgatatagtacgtactatgccaaatgaatcacgtgttaaacaatgggtgatggatacacttaatggtataatgatgaatgaacgcgatgtttctgtaagcgttggcaccggaatactattcatggaaatgtttttcgattacaataaaaatagtatcaacaatcaactaatgtatgatataattaatagcgtatctataattctagctaatgagagatatagaagcgcttttaacgacgatggtatatacatccgtagaaatatgattaacaagttgtacggatacgcatctctaactactattggcacgatcgctggaggtgtttgttattatctgttgatgcatctagttagtttgtataaataattatttcaatatactagttaaaattttaagattttaaatgtataaaaaactaataacgtttttatttgtaataggtgcagtagcatcctattcgaataatgagtacactccgtttaataaactgagtgtaaaactctatatagatggagtagataatatagaaaattcatatactgatgataataatgaattggtgttaaattttaaagagtacacaatttctattattacagagtcatgcgacgtcggatttgattccatagatatagatgttataaacgactataaaattattgatatgtataccattgactcgtctactattcaacgcagaggtcacacgtgtagaatatctaccaaattatcatgccattatgataagtacccttatattcacaaatatgatggtgatgagcgacaatattctattactgcagagggaaaatgctataaaggaataaaatatgaaataagtatgatcaacgatgatactctattgagaaaacatactcttaaaattggatctacttatatatttgatcgtcatggacatagtaatacatattattcaaaatatgatttttaaaaatttaaaatatattatcacttcagtgacagtagtcaaataacaaacaacaccatgagatatattataattctcgcagttttgttcattaatagtatacatgctaaaataactagttataagtttgaatccgtcaattttgattccaaaattgaatggactggggatggtctatacaatatatcccttaaaaattatggcatcaagacgtggcaaacaatgtatacaaatgtaccagaaggaacatacgacatatccgcatttccaaagaatgatttcgtatctttctgggttaaatttgaacaaggcgattataaagtggaagagtattgtacgggactatgcgtcgaagtaaaaattggaccaccgactgtaacattgactgaatacgacgaccatatcaatttgtacatcgagcatccgtatgctactagaggtagcaaaaagattcctatttacaaacgcggtgacatgtgtgatatctacttgttgtatacggctaacttcacattcggaaattctaaagaaccagtaccatatgatatcgatgactacgattgcacgtctacaggttgcagcatagactttgccacaacagaaaaagtgtgcgtgacagcacagggagccacagaagggtttctcgaaaaaattactccatggagttcgaaagtatgtctgacacctaaaaagagtgtatatacatgcgcaattagatccaaagaagatgttcccaatttcaaggacaaaatggccagagttatcaagagaaaatttaatacacagtctcaatcttatttaactaaatttctcggtagcacatcaaatgatgttaccacttttcttagcatgcttaacttgactaaatattcataactaatttttattaatgaaataaaactgcatattatacactggttaacgcccttataggctctaaccattttcaagatgaggtccctgattatagtccttctgttcccctccatgtctattagacgatgtgagaagactgaagaggaaacatggggattgaaaatagggttgtgtataattgccaaagatttttatcccgaaagaactgattgcagtgttcatctcccaactgcaagtgaaggattcagggatatacgaaacaccgataaattataaaaaaagcaatgtgtccgctgtttccgttaataatactattttcgtaactggcggattattcataaataactctaatagcacgatcgtggacatttataaagacaaacaatggtcgattatagaaatgcctatggctagggtatatcacggcatcgactcgacatttggaatgttatattttgccggaggtctatccgttaccgaacaatatggtaatttagagaaaaacaacgagatatcttgttacaatcctagaacgaataagtggtttgatatttcatatactatttataagatatccatatcatcattgtgtaaactaaataacgtcttctatgtatttagtaaggacattggatatgtggaaaagtatgatggtgcatggaagttagtacatgatcgtctccccgctataaaggcattatcaacttctccttattgattgaaaatataaatagtttttatgtatagcagtattaccctatagttttattgcttactactaacatggatacagatacagatacagatacagatacagatacagatacagatgttacaaatgtagaagatatcataaatgaaatagatagagagaaagaagaaatactaaaaaatgtagaaattgaaaataataaaaacattaacaagaatcatcccaatgaatatattagagaagcactcgttattaataccagtagtaatagtgattccattgataaagaagttatagaatgtatcagtcacgatgtaggaatatagatcatatctactaatttttataatcgatacaaaacataaaaaacaactcgttattacatagcaggcatggaatccttcaagtattgttttgataacgatggcaagaaatggattatcggaaatactttatattctggtaattcaatactatataaggtcagaaaaaatttcactagttcgttctacaattacgtaatgaagatagatcacaaatcacacaagccattgttgtctgaaatacgattctatatatctgtattggatcctttgactatcgacaactggacacgggaacgtggtataaagtatttggctattccagatctgtatggaattggagaaaccgatgattatatgttcttcgttataaagaattcgggaagagtattcgccccaaaggatactgaatcagtcttcgaagcatgcgtcactatgataaacacgttagagtttatacactctcaaggatttacccatggaaaaatagaaccgaggaatatactgattagaaataaacgtctttcactaattgactattctagaactaacaaactatacaagagtggaaactcacatatagattacaacgaggacatgataacttcaggaaatatcaattatatgtgtgtagacaatcatcttggagcaacagtttcaagacgaggagatttagaaatgttgggatattgcatgatagaatggttcggtggcaaacttccatggaaaaacgaaagtagtataaaagtaataaaacaaaaaaaagaatataaaaaatttatagctactttctttgaggactgttttcctgaaggaaatgaacctctggaattagttagatatatagaattagtatacacgttagattattctcaaactcctaattatgacagactacgtaaactgtttatacaagattgaaattatattcttttttttatagagtgtggtagtgttacggatatttaatattagactatctctatcgcgctacacgaccaatatcgattactatggatatcttctatgaaaggagagaatgtattcatttctccagcgtcaatctcgtcagtattgacaatactgtattatggagctaatggatccactgctgaacagctatcgaaatatgtagaaaaggaggagaacacggataaggttagcgctcagaatatctcattcaaatccatgaataaagtatatgggcgatattctgccgtgtttaaagatttctttttgggaaaaattggcgataagtttcaaactgttgacttcactgattgtcgcactatagatgcaatcaacaagtgtgtagatatctttactgaggggaaaatcaatccactattggatgaaccattgtctcctagcaattagtgccgtatactttaaagcaaaatggttgacgccattcgaaaaggaatttaccagtgattatcccttttacgtatctccgacggaaatggtagacgtaagtatgatgtctatgtacggcgagctatttaatcacgcatctgtaaaagaatcattcggcaacttttcaatcatagaactgccatatgttggagatactagtatgatggtcattcttccagacaagattgatggattagaatccatagaacaaaatctaacagatacaaattttaagaaatggtgtgactctctggaagctacgtttatcgatgttcacattcccaagtttaaggtaacaggctcgtataatctggtggatactctagtaaagtcaggactgacagaggtgttcggttcaactggagattatagcaatatgtgtaatttagatgtgagtgtcgacgctatgatccacaaaacgtatatagatgtcaatgaagagtatacagaagcagctgcagcaacttctgtactagtggcagactgtgcatcaacaattacaaatgagttctgtgtagatcatccgttcatctatgtgattaggcatgttgatggcaaaattcttttcgttggtagatattgctctccgacaactaattgttaaccattttttttaaaaaaaatagaaaaaacatgtggtattagtgcaggtcgttgttcttccaattgcaattggtaagatgacggccaactttagtacccacgtcttttcaccacagcactgtggatgtgacagactgaccagtattgatgacgtcaaacaatgtttgactgaatatatttattggtcgtcctatgcataccgcaacaggcaatgcgctggacaattgtattccacactcctctcttttagagatgatgcggaattagtgttcatcgacattcgcgagctggtaaaaaatatgccgtgggatgatgtcaaagattgtacagaaatcatccgttgttatataccggatgagcaaaaaaccatcagagagatttcggccatcatcggactttgtgcatatgctgctacttactggggaggtgaagaccatcccactagtaacagtctgaacgcattgtttgtgatgcttgagatgctaaattacgtggattataacatcatattccggcgtatgaattgatgagttgtacatcttgacattttctttcttctcttctccctttcttctcttctccctttcttctcttctcccttcctccctcttctccctttcccagaaacaaacttttttacccactataaaataaaatgagtatactacctgttatatttctttctatatttttttattcttcattcgttcagacttttaacgcgcctgaatgtatcgacaaagggcaatattttgcatcattcatggagttagaaaacgagccagtaatcttaccatgtcctcaaataaatacgctatcatccggatataatatattagatattttatgggaaaaacgaggagcggataatgatagaattataccgatagataatggtagcaatatgctaattctgaacccgacacaatcagactctggtatttatatatgcattaccacgaacgaaacctactgtgacatgatgtcgttaaatttgacaatcgtgtctgtctcagaatcaaatatagatcttatctcgtatccacaaatagtaaatgagagatctactggcgaaatggtatgtcccaatattaatgcatttattgctagtaacgtaaacgcagatattatatggagcggacatcgacgccttagaaataagagacttaaacaacggacacctggaattattaccatagaagatgttagaaaaaatgatgctggttattatacatgtgttttagaatatatatacagaggtaaaacatataacgtaaccagaattgtaaaattagaggtacgggataaaataataccttctattatgcaattaccagatggcattgtaacttcaataggtagtaatttgactattgcgtgtagagtatcgttgagacctcccacaacggatgcagacgtcttttggataagtaatggtatgtattacgaagaagatgatggggacggaaacggtagaataagtgtagcaaataaaatctatatgaccgataagagacgtgttattacatcccggttaaacattaatcctgtcaaggaagaagatgctacaacgtttacgtgtatggcgtttactattcctagcatcagcaaaacagttactgttagtataacgtgaatgtatgttgttacatttccatgtcaattgagtttataagaatttttatacattatcttccaacaaacaattgacgaacgtattgctatgattaactcccacgatactatgcatattattaatcattaacttgcaaactatacctagtgctattttgacatactcatgttcttgtgtaattgcggtatctatattattaaagtacgtaaatctagctatagttttattatttaattttagataatataccgtctccttatttttaaaaattgccacatcctttattaaatcatgaatgggaatttctatgtcatcgttagtatattgtgaacaacaagagcagatatctataggaaagggtggaatgcgatacattgatctatgtagttttaaaacacacgcgaactttgaagaatttatataaatcattccatcgatacatccttctatgttgagatgtatatatccaggaattcgtttattaatatcgggaaatgtataaactaaaacattgcccgaaagcggtgcctctatctgcgttatatccgttcttaacttacaaaatgtaaccaatacctttgcatgacttgttttgttcggcaacgttagtttaaacttgacgaatggattaattacaatagcatgatccgcgcatctattaagtttttttactttaacgcccttgtatgtttttacagagactttatctaaatttctagtgcttgtatgtgttataaatataacgggatatagaaccgaatcacctaccttagatacccaattacattttatcagatccagataataaacaaattttgtcgccctaactaattctatattgttatatattttacaattggttatgatatcatgtaataacttggagtctaacgcgcatcgtcgtacgtttatacaattgtgatttagtgtagtatatctacacatgtatttttccgcactatagtattctggactagtgataaaactatcgttatatctgtcttcaatgaactcatcgagatattgctctctgtcatattcatacacctgcataaactttctagacatcttacaatccgtgttattttaggatcatatttacatatttacgggtatatcaaagatgttagattagttaatgggaatcgtctataataatgaatattaaacaattatatgaggacttttaccacaaagcatcataaaaatgagtcgtcgtctgatttatgttttaaatatcaaccgcgaatcaactcataaaatacaagagaatgaaatatatacatattttagtcattgcaatatagaccatacttctacagaacttgattttgtagttaaaaactatgatctaaacagacgacaacctgtaactgggtatactgcactacactgctatttgtataataattactttacaaacgatgtactgaagatattattaaatcatggagtggatgtaacgatgaaaaccagtagcggacgtatgcctgtttatatattgcttactagatgttgcaatatttcacatgatgtagtgatagatatgatagacaaagataaaaaccacttatcgcatagagactattccaacctactactagagtatataaaatctcgttacatgttattgaaggaagaggatatcgatgagaacatagtatccactttattagataagggaatcgatcctaactttaaacaagacggatatacagcgttacattattattatttgtgtctcgcacacgtttataaaccaggtgagtgtagaaaaccgataacgataaaaaaggccaagcgaattatttctttgtttatacaacatggagctaatctaaacgcgttagataattgtggtaatacaccattccatttgtatcttagtattgaaatgtgtaataatattcatatgactaaaatgctgttgacttttaatccgaatttcgaaatatgtaataatcatggattaacgcctatactatgttatataacttccgactacatacaacacgatattcttgttatgttaatacatcactatgaaacaaatgttggagaaatgccgatagatgagcgtcgtatgatcgtattcgagtttatcaaaacatattctacacgtccggcagattcgataacttatttgatgaataggtttaaaaatataaatatttatacccgctatgaaggaaagacattattacacgtagcatgtgaatataataatacacaagtaatagattatcttatacgtatcaacggagatataaatgcgttaaccgacaataacaaacacgctacacaactcattatagataacaaagaaaattccccatataccattaattgtttactgtatatacttagatatattgtagataagaatgtgataagatcgttggtggatcaacttccatctctacctatctttcgtcgcttatcatactagtcatatcctaaatgttgatcatattccaccaaatgattgtgaaagagattgagattaaatcgtctaacaaacaattagtttttatgacattaacatataataaataaattaatcattattgacttaacgatgacgaaagttatcatcatcttaggattcttgattattaatacaaattcattgtctatgaaatgtgaacaaggtgtctcatattataattcacaagaattaaagtgttgtaaactatgtaagccaggaacatattcagatcatcgatgtgataaatacagcgataccatttgtggacattgtccgagtgacacattcacgtcaatatataatcgttctccttggtgtcatagttgtagaggtccatgtggtactaatcgagtagaggtcacaccttgtacacctaccacaaatagaatctgtcattgtgactcgaatagttattgtctccttaaagcttctgatggtaactgtgttacatgtgctcctaaaacaaaatgtggtcgtgggtatggaaagaaaggagaagatgaaatgggtaataccatttgtaagaaatgtcggaagggtacttattcagatattgtatctgactctgatcaatgtaaaccaatgacaagataagacttactcgcatctactggatagacataaaatatcctcctcgtaataatgaaatataatatacactaattattaatatcaataacaatcgagtattaatatataggtcatttttaaatcccttttgggttccgtcccaaacggcgtttcggtctgcgtcgccgccatggccatgccgagcctctccgcgtgctcctccatcgaggacgacttcaactatggcagctcggtggcgtctgccagcgtgcacatacgaatggcatttctaagaaaagtctacggtatcctttgtctacaatttcttttaacaacggcaacaactgcagtatttttatactttgactgcatgcggacatttatacaagggagtcctgttctaatattggcatcaatgttcggatctataggcttgattttcgcattgactttacacagacataaacatcccctgaatctgtacctgctttgtggatttacactgtcggaatctctaacgctggcctctgttgttactttctatgatgtgcatgtcgttatgcaagctttcatgctgactactgcagcgtttcttgctctgactacatatactctacaatcaaagagagatttcagtaaacttggagcaggattgtttgctgctttgtggattttaattttgtcaggactcttggggatatttgtgcaaaatgagacagtggagctggtcctgtctgcttttggggcccttgtattctgtggattcattatctatgacacgcactcactaatacataagctctcgcctgaagagtatgtgttagcctctatcaatctctacttggatatcatcaatctgttcttgcatctgttgcagcttttggaagtatctaataagaaataaagtttaaaatagaattaataaaaacatataggtcattttttaaacatggattggaaaccaaggtagttagttaatacacacaagatatatttttttcacatcatccacccatgggtaacaccaaggttgttagttaataatatacaagatattttttctcactctgatccatgtaaaccaaggacgagataagacactctcattcctcatccacaacccattaaaaaaatggaaattaaagccctctattagcataaacggctacaggtctacctttacaatggcctttccttgtgcccagttcagaccctgtcattgccacgctactaaggactccctgaataccgtggccgacgtcagacattgtctgactgaatacatcctgtgggtttctcatagatggacccatagagaaagcgcagggtctctctacaggcttctcatctctttcagaactgatgcaacggagctctttggtggtgagttgaaggattcacttccgtgggacaattgcgtggagatcattaaatgtttcatcagaaatgactccatgaaaaccgccgaagaacttcgtgcaatcattggactttgtactcaatcagctatcgtctctggaagagtcttcaacgataagtatatcgacatactacttatgctgcgaaagattctgaacgagaacgactatctcaccctcttggatcatatccgcactgctaaatactaaatctccttcatgctctctcactacactttttatcatcttatgaggaatgattgccttcgtgaaataggaataattagcaccagaatagctatggattattgtggtagagagtgcactattctatgtcgtctactggatgaagatgtgacgtacaaaaaaataaaaccagagattgaaacgtgtcacaacttatcaaaacatatagatagacgaggaaacaatgcgctacattgttacgtcttcaataaatgcgatacagacattaagattgttcggctgttactctctcgcggagtcgagagactttgtagaaacaacgaaggattaactccgctaggagcatacagtaagcatagatacgtaaaatctcagattgtgcatctactgatatccagctattcaaattcctctaacgaactcaagtcgaatataaatgatttcgatctgtattcggataatatcgacttacgtctgctaaaatacctaattgtggataaacggatacgtccgtccaagaatacgaattatgcaatcaatggtctcggattggtggatatatacgtaacgacgcctaatccgagaccagaagtattgctatggcttcttaaatcagaatgttacagcaccggttacgtatttcgtacctgtatgtacgacagtgatatgtgtaagaactctcttcattactatatatcgtctcatagagaatctcaatctctatccaaggatgtaattaaatgtttgatcgataacaatgtttccatccatggcagagacgaaggaggatctttacccatccaatactactggtctttctcaaccatagatatagagattgttaaattattattaataaaggatgtggacacgtgtagagtatacgacgtcagccctatattagaggcgtattatctaaacaagcgatttagagtaaccccatataatgtagacatggaaatcgttaatcttcttattgagagacgtcatactcttgtcgacgtaatgcgtagtattacttcgtacgattccagagaatataaccactacatcatcgataacattctaaagagatttagacaacaggatgtacaagccatgttgataaactacttacattacggcgatatggtcgttcgatgcatgttagataacggacaacaactatcctctgcacgactactttgttaataataatctcgtcgatgtaaacgtcgtaaggtttatcgtggaaaatatggacacgcggctgtaaatcacgtatcgaacaatggccgtctatgtatgtacggtctgatattatcgagatttaataattgcgggtatcactgttatgaaaccatactgatagatgtatttgatatactaagcaagtacatggatgatatagatatgatcgataactctactatattacgcggtcgatgtcaataatatacaatttgcaaagcggttattggaatatggagcgagtgtcacgctcgataatcaatacggccatccagaaaagcagttaccaaagagaaaacaaaacgaagctagttgatttattactgagttaccatcccactctagagactatgattgacgcatttaatagagatatacgctatctatatcctgaaccattattcgcctgtatcagatacgccttaatcctagatgatgattttccttctaaagtaaagtatgatatcgccggtcgtcataaggaactaaagcgctatagagtagacattaatagaatgaagaatgtctacatatcaggcgtctccatgtttgatatattatttaaacgaagcaaacgccacaaattgagatacgcaaagaatccgacatcaaatggtacaaaaaagaactaacgtccatcattacagaaactgtaaagaacaatgagaggatcgactccatagtggacaacattaatacagacgataacttgatttcgaaattacccatggagatactttattactccattaaataatttatcatggagcgataatgtcctgtttcatttgtttccatgacatattacaaaatcgattccgtccaagatgataaaaacatttaccggcatcataaacacggagtttattttatatgtctcgcataaacattactaaaaaaatatattgttcggttttctttcacatctttaattatgaaaaagtaaatcattatgagatggacgagattgtacgcatcgttcgcgacagtatgtggtacatacctaacgtatttatggacgacggtaagaatgaaggtcacgtttctgtcaacaatgtctgtcatatgtattttacgttctttgatgtggatacatcgtctcatctgtttaagctagttattaaacactgcgatctgaataaacgaggtaactctccattacattgctatacgatgaatacacgatttaatccatctgtattaaagatattgttacaccacggcatgcgtaactttgatagcaaggatgaccactatcaatcgataacaagatctttgatatactaacggacaccattgatgactttagtaaatcatccgatctattgctgtgttatcttagatataaattcaatgggagcttaaactattacgttctgtacaaaggatccgaccctaattgcgccgacgaggatgaactcacttctcttcattactactgtaaacacatatccacgttctacgaaagcaattattacaagttaagtcacactaagatgcgagccgagaagcgattcatctacgcgataatagattatggagcaaacattaacgcggttacacacttaccttcaacagtataccaaacatagtcctcgtgtggtgtatgctcttttatctcgaggatacgtaataatcttgattgtacacccatcatggaacgattgtgcaacaggtcatattctcataatgttactcaattggcacgaacaaaaggaagaaggacaacatctactttatctattcataaaacataatcaaggatacactctcaatatactacggtatctattagataggttcgacattcagaaagacgaatactataataccgcctttcaaaattgtaacaacaatgttgcctcatacatcggatacgacatcaaccttccgactaaagacggtattcgacttggtgtttgaaaacagaaacatcatatacaaggcggatgttgtgaatgacatcatccaccacagactgaaagtatctctacctatgattaaatcgttgttctacaagatgtctctccctacgacgattactacgtaaaaaagatactagcctactgcctattaagggacgagtcattcgcggaactacatagtaaattctgtttaaacgaggactataaaagtgtatttatgaaaaatatatcattcgataagatagattccatcatcgtgacataagtcgcctcaaagagattcgaatctccgacaccgacctgtatacggtatcacagctatcttaaagccatacattcagacagtcacatttcatttcccatgtacgacgatctcatagaacagtgccatctatcgatggagcgtaaaagtaaactcgtcgacaaagcactcaataaattagagtctaccatcggtcaatctagactatcgtatttgcctccggaaattatgcgcaatatcatctaaacagtatgttgtacggaaagaaccattacaaatattatccatgatagaaagaaaatatctatatgattggagaagtaggaaacaggaacaagacaacgattactacattattaaatcatgaagtccgtattatactcgtatatattgtttctctcatgtataataataaacggaagagatatagcaccgcatgcaccatccgatggaaagtgtaaagacaacgaatacaaacgccataatttgtgtccgggaacatacgcttccagattatgcgatagcaagactaacacacgatgtacgccgtgtggttcgggtaccttcacatctcgcaataatcatttacccgcttgtctaagttgtaacggaagacgcgatcgtgtaacacgactcacaatagaatctgtgaatgctctcccggatattattgtcttctcaaaggatcatccggatgcaaggcatgtgtttcccaaacaaaatgtggaataggatacggagtatccggagacgtcatctgttctccgtgtggtctcggaacatattctcacaccgtctcttccgcagataaatgcgaacccgtacccagaaatacgtttaactatatcgatgtggaaattaacctgtatccagttaacgacacgtcgtgtactcggacgaccactaccggtctcagcgaatccatctcaacgtcggaactaactattactatgaatcataaagactgtaatcccgtatttcgtgatggatacttctccgttcttaataaggtagcgacttcaggtttctttacaggagaaaggtgtgcactctgaatttcgagattaaatgcaataacaaagattcttcctccaaacagttaacgaaagcaaagaatgatactatcatgccgcattcggagacagtaactctagtgggcgacatctatatactatatagtaataccaatactcaagactacgaaactgatacaatctcttatcatgtgggtaatgttctcgatgtcgatagccatatgcccggtagttgcgatatacataaactgatcactaattccaaacccacccactttttatagtaagtttttcacccataaataataaatacaataattaatttctcgtaaaagtagaaaatatattctaatttattgcacggtaaggaagtagaatcataaagaacagtactcaatcaatagcaattatgaaacaatatatcgtcctggcatgcatgtgcctggcggcagctgctatgcctgccagtcttcagcaatcatcctcatcctcctcctcgtgtacggaagaagaaaacaaacatcatatgggaatcgatgttattatcaaagtcacaaagcaagaccaaacaccgaccaatgataagatttgccaatccgtaacggaaattacagagtccgagtcagatccagatcccgaggtggaatcagaagatgattccacatcagtcgaggatgtagatcctcctaccacttattactccatcatcggtggaggtctgagaatgaactttggattcaccaaatgtcctcagattaaatccatctcagaatccgctgatggaaacacagtgaatgctagattgtccagcgtgtccccaggacaaggtaaggactctcccgcgatcactcatgaagaagctcttgctatgatcaaagactgtgaagtgtctatcgacatcagatgtagcgaagaagagaaagacagcgacatcaagacccatccagtactcgggtctaacatctctcataagaaagtgagttacgaagatatcatcggttcaacgatcgtcgatacaaaatgcgtcaagaatctagagtttagcgttcgtatcggagacatgtgcaaggaatcatctgaacttgaggtcaaggatggattcaagtatgtcgacggatcggcatctgaaggtgcaaccgatgatacttcactcatcgattcaacaaaactcaaagcgtgtgtctgaatcgataactctattcatctgaaattggatgagtagggttaatcgaacgattcaggcacaccacgaattaaaaaagtgtaccggacactatattccggtttgcaaaacaaaaatgttcttaactacattcacaaaaagttacctctcgcgacttcttctttttctgtctcaatagtgtgatacgattatgacactattcctattcctattcctatttcctttcagagtatcacaaaaatattaaacctctttctgatggtctcataaaaaaagttttacaaaaatatttttattctctttctctctttgatggtctcataaaaaaagttttacaaaaatatttttattctctttctctctttgatggtctcataaaaaaagttttacaaaaatatttttattctctttctctctttgatggtctcataaaaaaagttttacaaaaatatttttattctctttctctctttgatggtctcataaaaaaagttttacaaaaatatttttattctctttctctctttgatggtctcataaaaaaagttttacaaaaatatttttattctctttctctctttgatggtctcataaaaaaagttttacaaaaatatttttattctctttctctctttgatggtctcataaaaaaagttttacaaaaatatttttattctctttctctctttgatggtctcataaaaaaagttttacaaaaatatttttattctctttctctctttgatggtctcataaaaaaagttttacaaaaatatttttattctctttctctctttgatggtctcataaaaaaagttttacaaaaatatttttattctctttctctctttgatggtctcataaaaaaagttttacaaaaatatttttattctctttctctctttgatggtctcataaaaaaagttttacaaaaatatttttattctctttctctctttgatggtctcataaaaaaagttttacaaaaatatttttattctctttctctctttgatggtctcataaaaaaagttttacaaaaatatttttattctctttctctctttgatggtctcataaaaaaagttttacaaaaatatttttattctctttctctctttgatggtctcataaaaaaagttttacaaaaatatttttattctctttctctctttgatggtctcataaaaaaagttttacaaaaatatttttattctctttctctctttgatggtctcataaaaaagttttacaaaaatatttttattctctttctctctttgat

SEQ ID NO: 9 - DNA, 203057 bp, Artificial Sequence
  GLV-1h68
ttatgagaccatcaaagagagaaagagaataaaaatatttttgtaaaactttttttatgagaccatcaaagagagaaagagaataaaaatatttttgtaaaacttttttatgagaccatcaaagagagaaagagaataaaaatatttttgtaaaacttttttatgagaccatcaaagagagaaagagaataaaaatatttttgtaaaactttttttatgagaccatcaaagagagaaagagaataaaaatatttttgtaaaactttttttatgagaccatcaaagagagaaagagaataaaaatatttttgtaaaactttttttatgagaccatcaaagagagaaagagaataaaaatatttttgtaaaactttttttatgagaccatcaaagagagaaagagaataaaaatatttttgtaaaactttttttatgagaccatcaaagagagaaagagaataaaaatatttttgtaaaactttttttatgagaccatcaaagagagaaagagaataaaaatatttttgtaaaactttttttatgagaccatcaaagagagaaagagaataaaaatatttttgtaaaactttttttatgagaccatcaaagagagaaagagaataaaaatatttttgtaaaactttttttatgagaccatcaaagagagaaagagaataaaaatatttttgtaaaactttttttatgagaccatcaaagagagaaagagaataaaaatatttttgtaaaactttttttatgagaccatcaaagagagaaagagaataaaaatatttttgtaaaactttttttatgagaccatcagaaagaggtttaatatttttgtgatactctgaaaggaaataggaataggaataggaatagtgtcataatcgtatcacactattgagacagaaaaagaagaagtcgcgagaggtaactttttgtgaatgtagttaagaacatttttgttttgcaaaccggaatatagtgtccggtacacttttttaattcgtggtgtgcctgaatcgttcgattaaccctactcatccaatttcagatgaatagagttatcgattcagacacacgctttgagttttgttgaatcgatgagtgaagtatcatcggttgcaccttcagatgccgatccgtcgacatacttgaatccatccttgacctcaagttcagatgattccttgcacatgtctccgatacgaacgctaaactctagattcttgacgcattttgtatcgacgatcgttgaaccgatgatatcttcgtaactcactttcttatgagagatgttagacccgagtactggatgggtcttgatgtcgctgtctttctcttcttcgctacatctgatgtcgatagacacttcacagtctttgatcatagcaagagcttcttcatgagtgatcgcgggagagtccttaccttgtcctggggacacgctggacaatctagcattcactgtgtttccatcagcggattctgagatggatttaatctgaggacatttggtgaatccaaagttcattctcagacctccaccgatgatggagtaataagtggtaggaggatctacatcctcgactgatgtggaatcatcttctgattccacctcgggatctggatctgactcggactctgtaatttccgttacggattggcaaatcttatcattggtcggtgtttggtcttgctttgtgactttgataataacatcgattcccatatgatgtttgttttcttcttccgtacacgaggaggaggatgaggatgattgctgaagactggcaggcatagcagctgccgccaggcacatgcatgccaggacgatatattgtttcataattgctattgattgagtactgttctttatgattctacttccttaccgtgcaataaattagaatatattttctacttttacgagaaattaattattgtatttattatttatgggtgaaaaacttactataaaaagtgggtgggtttggaattagtgatcagtttatgtatatcgcaactaccgggcatatggctatcgacatcgagaacattacccacatgataagagattgtatcagtttcgtagtcttgagtattggtattactatatagtatatagatgtcgcccactagagttactgtctccgaatgcggcatgatagtatcattctttgctttcgttaactgtttggaggaagaatctttgttattgcatttaatctcgaaattcagagtgcacacctttctcctgtaaagaaacctgaagtcgctaccttattaagaacggagaagtatccatcacgaaatacgggattacagtctttatgattcatagtaatagttagttccgacgttgagatggattcgctgagaccggtagtggtcgtccgagtacacgacgtgtcgttaactggatacaggttaatttccacatcgatatagttaaacgtatttctgggtacgggttcgcatttatctgcggaagagacggtgtgagaatatgttccgagaccacacggagaacagatgacgtctccggatactccgtatcctattccacattttgtttgggaaacacatgccttgcatccggatgatcctttgagaagacaataatatccgggagagcattcacagattctattgtgagtcgtgttacacgatcgcgtcttccgttacaacttagacaagcgggtaaatgattattgcgagatgtgaaggtacccgaaccacacggcgtacatcgtgtgttagtcttgctatcgcataatctggaagcgtatgttcccggacacaaattatggcgtttgtattcgttgtctttacactttccatcggatggtgcatgcggtgctatatctcttccgtttattattatacatgagagaaacaatatatacgagtataatacggacttcatgatttaataatgtagtaatcgttgtcttgttcctgtttcctacttctccaatcatatagatattttctttctatcatggataatatttgtaatggttctttccgtacaacatactgtttagatgatattgcgcataatttccggaggcaaatacgatagtctagattgaccgatggtagactctaatttattgagtgctttgtcgacgagtttacttttacgctccatcgatagatggcactgttctatgagatcgtcgtacatgggaaatgaaatgtgactgtctgaatgtatggctttaagatagctgtgataccgtatacaggtcggtgtcggagattcgaatctctttgaggcgacttatgtcacgatgatggaatctatcttatcgaatgatatatttttcataaatacacttttatagtcctcgtttaaacagaatttactatgtagttccgcgaatgactcgtcccttaataggcagtaggctagtatcttttttacgtagtaatcgtcgtagggagagacatcttgtagaacaacgatttcgttttgttttctcttctgtaactgcttttctggatggccgtattgattatcgagcgtgatactcgctccatattccaataaccgctttgcaaattgtatattattgacatcgaccgcgtaatatagtagagttatcgatcatatctatatcatccatgtacttgcttagtatatcaaatacatctatcagtatggtttcataacagtgatacccgcaattattaaatctcgataatatcagaccgtacatacatagacggccattgttcgatacgtgatttacagccgcgtgtccatattttccacgataaaccttacgacgtttacatcgacgagattattattaacaaagtagtcgtgtagaggatagttgttgtccgttatctaacatgcatcgaacgaccatatcgccgtaatgtaagtagtttatcagtatggcttgtacgatggattcatcctgttgtctaaatctctttagaatgttatcgatgatgtagtggttatattctctggaatcgtacgaagtaatactacgcattacgtcgacaagagtatgacgtctctcaataagaagattaacgatttccatgtctacattatatggggttactctaaatcgcttgtttagataatacgcctctaatatagggctgacgtcgtatactctacacgtgtccacatcctttattaataataatttaacaatctctatatctatggttgagaaagaccagtagtattggatgggtaaagatcctccttcgtctctgccatggatggaaacattgttatcgatcaaacatttaattacatccttggatagagattgagattctctatgagacgatatatagtaatgaagagagttcttacacatatcactgtcgtacatacaggtacgaaatacgtaaccggtgctgtaacattctgatttaagaagccatagcaatacttctggtctcggattaggcgtcgttacgtatatatccaccaatccgagaccattgattgcataattcgtattcttggacggacgtatccgtttatccacaattaggtattttagcagacgtaagtcgatattatccgaatacagatcgaaatcatttatattcgacttgagttcgttagaggaatttgaatagctggatatcagtagatgcacaatctgagattttacgtatctatgcttactgtatactcctagcggagttaatccttcgttgtttctacaaagtctctcgactccgcgagagaacaatcttaatgtctgtatcgcatttattggagacgtaacaatgtagcgcattgtttcctcgtctatctatatgttttgataagttgtgacacgtttcaatttctagttttatttttttgtacgtcacatcttcatccagtagacgacatagaatagtgcactctctaccacaataatccatagctattctggtgctaattattcctatttcacgaaggcaatcattcctcataagatgataaaaagtgtagtggagatttagtatttagcagtgcggatatgatccaagagggtgagatagtcgttctcgttcagaatctttcgcagcataagtagtatgtcgatatacttatcgttgaagactctttataaaagtctatttgtttatatttattgcggatagcagtatttccctataaaaagtatacgtcctgtggtgtctttaatcatgtacatgaatggatggtttatgtagaccttcgtacgatataccatcgaaaagttaatcgtaaatactcctgtaacggccgatgcttctgtatactcctcattaacatctataaacgtcgtatgtagaaatttttctacagtgatagtttcattacacatcttgctaaaatctgcataatatccgaatatattagtaagtcctaaattttctaaaatcggtaccagattatacggttctgtcatttccactttaaactttggcatatacaagtctatacttttagtagataacataccacaccattttttaaatttttcatctgttatatttttttctatgttatatataccttctatgtcgtccggtagtataattaccatactagagtttccctcgtatggaatatcgataatagagaatcctccgaataattcattaatatgtacatattgcaagttattctcggtacccaccatcatatcaacgctggtaactatattcttagaaatataaaacttgtctgtatatgtaagatgtttagaaaatggatatttccacattgctttaaaatggacggcgctaacaactgtcatacgagtattaatggatagcggactagtcaataaggaattaattttaccatttgtcattgtcttaacccattcgttgattagttcctttgtttggttagcattattaaagtttacagtttgaaaatcgtcttttattttttgtaggaaggaggcgtggaactcgatactatcgctaccgtatattttatttgcggtagctagtgtcgcacaatacggaatatctacctccatgtcatcattattgtcatcgggtgtattctcattcatattctctatatattttgatagttgttcagctgtagaaccagctgctccatgatttagaatagataaagtagataaaatggaaactggagaaatcaaaacattttcatcagggtgttttaagattagttctttaaagatatccatggtatagacctaacgataacgatatatatcataaataaataatgttaaatttcaatttatgtttgtaccccgtattcatacttaacaaattggtattgcgtacacaatcaatcatattacataccattaataatgcaagcataaaaaattgttagtagatgtttctaaatataggttccgtaagcaaagaatataagaatgaagcggtaatgataaaatcaatcgttatctaaaatgatcatactcatttattttattctattatattaacacatacatttttaacagcaacacattcaatattgtattgttatttttatattatttacacaattaacaatatattattagtttatattactgaattaataatataaaattcccaatcttgtcataaacacacactgagaaacagcataaacacagaatccatcaaaaatgttgataaattatctgatgttgttgttcgctgctatgataatcagatcattcgccgatagtggtaacgctatcgaaacgacattgccagaaattacaaacgctacaacagatattccagctatcagattatgcggtccagagggagatggatattgtttacacggtgactgtatccacgctagagatattgacggtatgtattgtagatgctctcatggttatacaggcattagatgtcagcatgtagtattagtagactatcaacgttcagaaaacccaaacactacaacgtcatatatcccatctcccggtattatgcttgtattagtaggcattattatgtgttgtctattatctgtttataggttcactcgacgaactaaactacctatacaagatatggttgtgccataatttttataaatttttttatgagtatttttacaaaaatgtataaagtgtatgtcttatgtatatttataaaaatgctaagtatgcgatgtatctatgttatttgtatttatctaaacaatacctctacctctagatattatacaaaaattttttatttcggcatattaaagtaaaatctagttaccttgaaaatgaatacagtgggtggttccgtatcaccagtaagaacataatagtcaaatacagtatccgattgagattttgcatacaatactagtctagaaagaaatttgtaatcatcttctgtgacgggagtccatatatctgtatcatcgtctagtttatcagtgtcccatgctatattcctgttatcatcattagttaatgaaaataactctcgtgcttcagaaaagtcaaatattgtatccatacatacatctccaaaactatcgcttatacgtttatctttaacgatacctatacctagatggttatttactaacagacattttccagatctattgactataactcctatagtttccacatcaaccaagtaatgatcatctattgttatataacaataacataactcttttccatttttatcagtatgtatatctatatcaacgtcgtcgttgtagtgaatagtagtcattgatctattatatgaaacggatatgtctagaacggcaattgttttacgtccagttaacactttcgttgatttaaagtctagagtctttgcaaacataatatccttatccgactttatatttcctgtagggtggtataattttattttgcctccacatatcggtgtttccaaatatattactagacaatattccatatagttattagttaagggtacccaattagaacacgtacgcttattatcatcatttggatcgtatttcataaaagttattgtgttatcgatgtcaacacattctacattttttaatcgtctatatagtatttttctgatattttctataatatcagaattgtcttccatcggaagttgtatactatcggaatcagttacatgtttaaataattctctgatgtcattccttatacaatcaaattcattattaaacagtttaatagtctgtagacctttatcgtcgtaaatatccattgtcttattagttacgcttatttttatgtgtttttacgttgctttattatattttataagaatgattgtttgacgaatcacgagaactattaagacacattattaggtatatattataaaaaagtttttgattacgatgttataagaggaaagaggacacattaacatcatacatcaattaactacattcttataacatcgtaatcaaaagaattgcaattttgatgtataacaactgtcaatgggttatggaattgtatattacatattatacggtatgttggtaacgacaaataccggtcggtaattgtctgccggtgtaatagaattatatatatctatctattacaccggccttgtatacataataataagttgtggtagtatgatctccatatttataatttaggactttgtattcagtatttttggaatcataaaaaataaaaaaaagttttactaatttaaaatttaaaaagtatttacatttttttcactgtttagtcgcggatatggaattcgatcctgccaaaatcaatacatcatctatagatcatgtaacaatattacaatacatagatgaaccaaatgatataagactaacagtatgcattatccgaaatattatatcaatatcacaaaaataaatacacatttggctaatcaatttcgggcttggaaaaaacgtatcgccggaagggactatatgactaacttatctagagatacaggaatacaacaatcaaaacttactgaaactatacgtaactgtcaaaaaaatagaaacatatatggtctatatatacactacaatttagttattaattggataaccgatgtgattatcaatcaatattaagagggttggtaaattggtacatagctaataatacctatactccaaatacacccaataatacaacaaccatttctgagttggatatcatcaaaatactaaataaatacgaggacgtgtatagagtaagtaaagaaaaagaatgtggaatttgctatgaagttgtttactcaaaacgatagatactttggtttattggattcgtgtactcatatattttgcataacatgcatcaatatatggcatagaacacgaagagaaaccggtgcgtcggataattgtcctatatgccgtacccgttttagaaacataacaatgagcaagttctataagctagttaactaataaataaaaagtttaatttgttgacgacgtatgtcgttattttttctcgtataaaagattaatttgattctaatataatctttagtattggataaatatcaattcaaattaattccattagattatatcataaataaaaatagtagcacacaactacttcagcaaacattctttttataaatgccatctagcgtagcgaggacacaagtgaacctataattatcaaatttattagtatcagtcacatgaaggactttacgtagagtgacgattccactatctgtggtacgaacggtttcatcttctttgatgccatcacccagatgttctataaacttggtatcctcgtccgatttcatatcctttgccaaccaatacatatagctaaactcaggcatatgttccacacatcctgaacaatgaaattctccagaagatgttacaatgtctagatttggacatttggtttcaaccgcgttaacatatgagtgaacacacccatacatgaaagcgatgagaaataggattctcatcttgccaaaatatcactagaaaaaatttatttatcagttttaaaggtataaaaaatacttattgttgctcgaatattttgtatttgatggtatacggaagattagaaatgtaggtattatcatcaactgattctatggttttatgtattctatcatgtttcactattgcgttggaaataatatcatatgcttccacatatattttattttgttttaactcataatactcacgtaattctggattattggcatatctatgaataattttagctccatgatcagtaaatattaatgagaacatagtattaccacctaccattatttttttcatctcattcaattcttaattgcaaagatctatataatcattatagcgttgacttatggactctggaatcttagacgatgtacagtcatctataatcatggcatatttaatacattgttttatagcatagtcgttatctacgatgttagatatttctctcaatgaatcaatcacacaatctaatgtaggtttatgacataatagcattttcagcagttcaatgtttttagattcgttgatggcaatggctatacatgtatatccgttatttgatctaatgttgacatctgaaccggattctagcagtaaagatactagagattgtttattatatctaacagccttgtgaagaagtgtttctcctcgtttgtcaatcatgttaatgtctttaagataaggtaggcaaatgtttatagtactaagaattgggcaagcataagacatgtcacaaagacccttttttgtatgtataagtgtaaaaattataacatccatagttggatttacataggtgtccaatcgggatctctccatcatcgagataattgatggcatctcccttccttttttagtagatatttcatcgtgtaagaatcaatattaatatttctaaagtatccgtgtatagcctctttatttaccacagctccatattccactagagggatatcgccgaatgtcatatactcaattagtatatgttggaggacatccgagttcattgttttcaatatcaaagagatggtttccttatcatttctccatagtggtacaatactacacattattccgtgcggctttccattttccaaaaacaatttgaccaaatctaaatctacatctttattgtatctataatcactatttagataatcagccataattcctcgagtgcaacatgttagatcgtctatatatgaataagcagtgttatctattcctttcattaacaatttaacgatgtctatatctatatgagatgacttaatataatattgaagagctgtacaatagtttttatctataaaagacggcttgattccgtgattaattagacatttaacaacttccggacgcacatatgctctcgtatccgactctgaatacagatgagagatgatatacagatgcaatacggtaccgcaatttcgtagttgataatcatcatacgcgtatcagtactcgtcctcataaagaacactgcagccattttctatgaacaaatcaataattttagaaacaggatcattgtcattacataattttctataactgaacgatggttttcacatttaacactcaagtcaaatccatgttctaccaacacctttatcaagtcaacgtctacatttttggatttcatatagctgaatatattaaagttatttatgttgctaaatccagtggcttctagtagagccatcgctatatccttattaactttaacatgtctactatttgtgtattcttctaatggggtaagctgtctccaatttttgcgtaatggattagtgccactgtctagtagtagtttgacgacctcgacattattacaatgctcattaaaaaggtatgcgtgtaaagcattattcttgaattggttcctggtatcattaggatctctgtctttcaacatctgtttaagttcatcaagagccacctcctcattttccaaatagtcaaacattttgactgaatgagctactgtgaactctatacacccacacaactaatgtcattaaatatcatgtcaaaaacttgtacaattattaataaaaataatttagtgtttaaattttaccagttccagattttacacctccgttaatacctccattaaccccactggacgatcctcctccccacattccaccgccaccagatgtataagttttagatcctttattactaccatcatgtccatggataaagacactccacatgccgccactaccccctttagaagacatattaataagacttaaggacaagtttaacaataaaattaatcacgagtaccctactaccaacctacactattatatgattatagtttctatttttacagtaccttgactaaagtttctagtcacaagagcaatactaccaacctacactattatatgattatagtttctatttttataggaacgcgtacgagaaaatcaaatgtctaatttctaacggtagtgttgataaacgattgttatccgcggatacctcctctatcatgtcgtctattttcttactttgttctattaacttattagcattatatattatttgattataaaacttatattgcttattagcccaatctgtaaatatcggattattaacatatcgtttctttgtaggtttatttaacatgtacatcactgtaagcatgtccttaccatttattttaatttgacgcatatccgcaatttctttttcgcagtcggttataaattctatatatgatggatacatgctacatgtgtacttataatcgactaatatgaagtacttgatacatattttcagtaacgatttattattaccacctatgaataagtacctgtgatcgtctaggtaatcaactgttttcttaatacattcgatggttggtaatttactcagaataatttccaatatcttaatatataattctgctatttctgggatatatttatctgccagtataacacaaatagtaatacatgtaaacccatattttgttattatattaatgtctgcgccattatctattaaccattctactaggctgacactatgcgactcaatacaatgataaagtatactacatccatgtttatctattttgtttatatcatcaatatacggcttacaaagttttagtatcgataacacatccaactcacgcatagagaaggtagggaataatggcataatatttattaggttatcatcattgtcattatctacaactaagtttccattttttaaaatatactcgacaactttaggatctctattgccaaatttttgaaaatatttatttatatgcttaaatctatataatgtagctccttcatcaatcatacatttaataacattgatgtatactgtatgataagatacatattctaacaatagatcttgtatagaatctgtatatcttttaagaattgtggatattaggatattattacataaactattacacaattctaaaatataaaacgtatcacggtcgaataatagttgatcaactatataattatcgattttgtgatttttcttcctaaactgtttacgtaaatagttagatagaatattcattagttcatgaccactatagttactatcgaataacgcgtcaaatatttcccgtttaatatcgcatttgtcaagataataatagagtgtggtatgttcacgataagtataataacgcatctctttttcgtgtgaaattaaatagtttattacgtccaaagatgtagcataaccatcttgtgacctagtaataatataataatagagaactgttttacccattctatcatcataatcagtggtgtagtcgtaatcgtaatcgtctaattcatcatcccaattataatattcaccagcacgtctaatctgttctattttgatcttgtatccatactgtatgttgctacatgtaggtattcctttatccaataatagtttaaacacatctacattgggatttgatgttgtagcgtatttttctacaatattaataccatttttgatactatttatttctatacctttcgaaattagtaatttcaataagtctatattgatgttatcagaacatagatattcgaatatatcaaaatcattgatatttttatagtcgactgacgacaataacaaaatcacaacatcgtttttgatattattatttttcttggtaacgtatgcctttaatggagtttcaccatcatactcatataatggatttgcaccactttctatcaatgattgtgcactgctggcatcgatgttaaatgttttacaactatcatagagtatcttatcgttaaccatgattggttgttgatgctatcgcattttttggtttctttcatttcagttatgtatggatttagcacgtttgggaagcatgagctcatatgatttcagtactgtagtgtcagtactattagtttcaataagatcaatctctagatctatagaatcaaaacacgataggtcagaagataatgaatatctgtaggcttcttgttgtactgtaacttctggttttgttagatggttgcatcgtgctttaacgtcaatggtacaaattttatcctcgctttgtgtatcatattcgtccctactataaaattgtatattcagattatcatgcgatgtgtatacgctaacggtatcaataaacggagcacaccatttagtcataaccgtaatccaaaaatttttaaagtatatcttaacgaaagaagttgtgtcattgtctacggtgtatggtactagatcctcataagtgtatatatctagagtaatgtttaatttattaaatggttgataatatggatcctcgtgacaatttccgaagatggaaataagacataaacacgcaataaatctaattgcggacatggttactccttaaaaaaatacgaataatcaccttggctatttagtaagtgtcatttaacactatactcatattaatccatggactcataatctctatacgggattaacggatgttctatatacggggatgagtagttctcttctttaactttatactttttactaatcatatttagactgatgtatgggtaatagtgtttgaagagctcgttctcatcatcagaataaatcaatatctctgtttttttgttatacagatgtattacagcctcatatattacgtaatagaacgtgtcatctaccttattaactttcaccgcatagttgtttgcaaatacggttaatcctttgacctcgtcgatttccgaccaatctgggcgtataatgaatctaaactttaattgcttgtaatcattcgaaataatttttagtttgcatccgtagttatcccctttatgtaactgtaaatttctcaacgcgatatctccattaataatgatgtcgaattcgtgctgtatacccatactgaatggatgaacgaataccgacggcgttaatagtaatttactttttcatctttacatattgggtactagttttactatcataagtttataaattccacaagctactatggaataagccaaccatcttagtataccacacatgtcttaaagtttattaattaattacatgttgttttatatatatcgctacgaatttaaagagaaattagtttaggaagaaaaattatctatctacatcatcacgtctctgtattctacgatagagtgctactttaagatgcgacagatccgtgtcatcaaatatatactccattaaaatgattattccggcagcgaacttgatattggatatatcacaacctttgttaatatctacgacaatagacagcagtcccatggttccataaacagtgagtttatctttctttgaagagatattttgtagagatcttataaaactgtcgaatgacatcgcatttatatctttagctaaatcgtatatgttaccatcgtaatatctaaccgcgtctatcttaaacgtttccatcgctttaaagacgtttccgatagatggtctcatttcatcagtcatactgagccaacaaatataatcgtgtataacatctttgatagaatcagactctaaagaaaacgaatcggctttattatacgcattcatgataaacttaatgaaaaatgtttttcgttgtttaagttggatgaatagtatgtcttaataattgttattatttcattaattaatatttagtaacgagtacactctataaaaacgagaatgacataactaatcataactagttatcaaagtgtctaggacgcgtaattttcatatggtatagatcctgtaagcattgtctgtattctggagctattttctctatcgcattagtgagttcagaatatgttataaatttaaatcgaataacgaacataactttagtaaagtcgtctatattaactcttttattttctagccatcgtaataccatgtttaagatagtatattctctagttactacgatctcatcgttgtctagaatatcacatactgaatctacatccaattttagaaattggtctgtgttacatatctcttctatattattgttgatgtattgtcgtagaaaactattacgtagaccattttctttataaaacgaatatatagtactccaattatctttaccgatatatttgcacacataatccattctctcaatcactacatctttaagattttcgttgttaagatatttggctaaactatataattctattagatcatcaacagaatcagtatatatttttctagatccaaagacgaactctttggcgtcctctataatattcccagaaaagatattttcgtgttttagtttatcgagatctgatctgttcatatacgccatgattgtacggtacgttatgataaccgcataaaataaaaatccattttcatttttaaccaatactattcataattgagattgatgtaatactttgttactttgaacgtaaagacagtacacggatccgtatctccaacaagcacgtagtaatcaaatttggtgttgttaaacttcgcaatattcatcaatttagatagaaacttatactcatcatctgttttaggaatccatgtattattaccactttccaacttatcattatcccaggctatgtttcgtccatcatcgttgcgcagagtgaataattcttttgtattcggtagttcaaatatatgatccatgcatagatcggcaaagctattgtagatgtgatttttcctaaatctaatataaaactcgtttactagcaaacactttcctgatttatcgaccaagacacatatggtttctaaatctatcaagtggtggggatccatagttatgacgcagtaacatatattattacattcttgactgtcgctaatatctaaatatttattgttatcgtattggattctgcatatagatggcttgtatgtcaaagatatagaacacataaccaatttatagtcgcgctttacattctcgaatctaaagttaagagatttagaaaacattatatcctcggatgatgttatcactgtttctggagtaggatatattaaagtctttacagatttcgtccgattcaaataaatcactaaataatatcccacattatcatctgttagagtagtatcattaaatctattatattttatgaaagatatatcactgctcacctctatatttcgtacatttttaaactgtttgtataatatctctctgatacaatcagatatatctattgtgtcggtagacgataccgttacatttgaattaatggtgttccattttacaacttttaacaagttgaccaattcatttctaatagtatcaaactctccatgattaaatattttaatagtatccattttatatcactacggacacaaagtagctgacataaaccattgtataatttttatgttttatgtttattagcgtacacattttggaagttccggcttccatgtatttcctggagagcaagtagatgatgaggaaccagatagtttatatccgtacttgcacttaaagtctacattgtcgttgtatgagtatgatcttttaaacccgctagacaagtatccgtttgatattgtaggatgtggacatttaacaatctgacacgtgggtggatcggaccattctcctcctgaacacaggacactagagttaccaatcaacgaatatccactattgcaactataagttacaacgctcccatcggtataaaaatcctcgtatccgttatgtcttccgttggatatagatggaggggattggcatttaacagattcacaaataggtgcctcgggattccataccatagatccagtagatcctaattcacaatacgatttagattcaccgatcaactgatatccgctattacaagagtacgttatactagagccaaagtctactccaccaatatcaagttggccattatcgatatctcgaggcgatgggcatctccgtttaatacattgattaaagagtgtccatccagtacctgtacatttagcatatataggtcccattttttgctttctgtatccaggtagacatagatattctatagtgtctcctatgttgtaattagcattagcatcagtctccacactattcttaaatttcatattaatgggtcgtgacggaatagtacagcatgatagaacgcatcctattcccaacaatgtcaggaacgtcacgctctccaccttcatatttatttatccgtaaaaatgttatcctggacatcgtacaaataataaaaagcccatatatgttcgctattgtagaaattgtttttcacagttgctcaaaaacgatggcagtgacttatgagttacgttacactttggagtctcatctttagtaaacatatcataatattcgatattacgagttgacatatcgaacaaattccaagtatttgattttggataatattcgtattttgcatctgctataattaagatataatcaccgcaagaacacacgaacatctttcctacatggttaaagtacatgtacaattctatccatttgtcttccttaactatatatttgtatagataattacgagtctcgtgagtaattccagtaattacatagatgtcgccgtcgtactctacagcataaactatactatgatgtctaggcatgggagacttttttatccaacgatttttagtgaaacattccacatcgtttaatactacatatttctcatacgtggtataaactccacccattacatatatatcatcgtttacgaataccgacgcgcctgaatatctaggagtaattaagtttggaagtcttatccatttcgaagtgccgtgtttcaaatattctgccacacccgttgaaatagaaaattctaatcctcctattacatataactttccatcgttaacacaagtactaacttctgattttaacgacgacatattagtaaccgttttccattttttcgttttaagatctacccgcgatacggaataaacatgtctattgttaatcatgccgccaataatgtatagacaattatgtaaaacatttgcattatagaattgtctatctgtattaccgactatcgtccaatattctgttctaggagagtaatgggttattgtggatatataatcagagtttttaatgactactatattatgttttataccatttcgtgtcactggctttgtagatttggatatagttaatcccaacaatgatatagcattgcgcatagtattagtcataaacttgggatgtaaaatgttgatgatatctacatcgtttggatttttatgtatccactttaataatatcatagctgtaacatcctcatgatttacgttaacgtcttcgtgggataagatagttgtcagttcatcctttgataattttccaaattctggatcggatgtcaccgcagtaatattgttgattatttctgacatcgacgcattatatagttttttaattccatatcttttagaaaagttaaacatccttatacaatttgtgaaattaatattatgaatcatagtttttacacatagatctactacaggcggaacatcaattattatggcagcaactagtatcatttctacattgtttatggtgatgtttatcttcttccagcgcatatagtctaatagcgattcaaacgcgtgatagtttataccattcaatataatcgcttcatcctttagatggtgatcctgaatgcgtttaaaaaaattatacggagacgccgtaataatttccttattcacttgtataatttccccattgatagaaaatattacgctttccattcttaaagtactataagtaattatagtataatgtaaacgtttatatattcaatatttttataaaaatcattttgacattaattcctttttaaatttccgtctatcatctatagaaacgtattctatgaatttataaaatgcttttacgtgtcctatcgtaggcgatagaaccgctaaaaagcctatcgaatttctacaaaagaatctgttatatggtatagggagagtataaaacattaaatgtccgtacttattaaagtattcagtagccaatcctaactctttcgaatacttattaatggctcttgttctgtacgaatctatttttttgaacaacggacctagtggtatatcttgttctatgtatctaaaataatgtctgactagatccgttagtttaatatccgcagtcatcttgtctagaatggcaaatctaactgcgggtttaggctttagtttagtttctatatctacatctatgtctttatctaacaccaaaaatataatagctaatattttattacaatcatccggatattcttctacgatctcactaactaatgtttctttggttatactagtatagtcactatcggacaaataaagaaaatcagatgatcgatgaataatacatttaaattcatcatctgtaagatttttgagatgtctcattagaatattattagggttagtactcattatcattcggcagctattacttattttattatttttcaccatatagatcaatcattagatcatcaaaatatgtttcaatcatcctaaagagtatggtgaatgactcttcccatctaatttctgaacgttcaccaatgtctctagccactttggcactaatagcgatcattcgcttagcgtcttctatattattaactggttgatttaatctatctagcaatggaccgtcggacagcgtcattctcatgttcttaatcaatgtacatacatcgccgtcatctaccaattcatccaacaacataagctttttaaaatcatcattataataggtttgatcgttgtcatttctccaaagaatatatctaataagtagagtcctcatgcttagttaacaactattttttatgttaaatcaattagtacaccgctatgtttaatacttattcatattttagtttttaggattgagaatcaatacaaaaattaatgcatcattaattttagaaatacttagtttccacgtagtcaatgaaacatttgaactcatcgtacaggacgttctcgtacaggacgtaactataaaccggtttatatttgttcaagatagatacaaatccgataactttttttacgaattctacgggatccactttaaaagtgtcataccgggttctttttatttttttaaacagatcaatggtgtgatgttgattaggtcttttacgaatttgatatagaatagcgtttacatattctccataatggtcaatcgccatttgttcgtatgtcataaattctttaattatatgacactgtgtattatttagttcatccttgttcattgttaggaatctatccaaaatggcaattatactagaactataggtgcgttgtatacacatattgatgtgtctgtttatacaatccatgatatttggatccatgctactaccttcgggtaaaattgtagcatcatataccatttctagtactttaggttcattattatccattgcagaggacgtcatgatcgaatcataaaaaaatatattatttttatgttattttgttaaaaataatcatcgaatacttcgtaagatactccttcatgaacataatcagttacaaaacgtttatatgaagtaaagtatctacgatttttacaaaagtccggatgcataagtacaaagtacgcgataaacggaataataatagatttatctagtctatctttttctatagctttcatagttagatacatggtctcagaagtaggattatgtaacatcagcttcgataaaatgactgggttatttagtcttacacattcgctcatacatgtatgaccgttaactacagagtctacactaaaatgattgaacaatagatagtctaccattgtttcgtattcagatagtacagcgtagtacatggcatcttcacaaattatatcattgtctaatagatatttgacgcatcttatggatcccacttcaacagccatcttaaaatcatattgctttcctttatcattaataatttctagaacatcatctctatcataaaagatacaaatattaactgtttgatccgtaataacattgctagtcaatagcaatttgttaataagatgcgctgggctcaatgtcttaataagaagtgtaagaggactatctccgaatttgttttgtttattaacatccgttgatggaagtaaaagatctataatgtctacattcttgactgttttagagcatacaatatggagaggtgtatttccatcatgatctggttttgagggactaattcctagtttcatcatccatgagattgtagaagcttttggattgtctgacataagatgtctatgaatatgatttttgccaaatttatccactatcctggcttcgaatccgatggacattatttttttaaacactctttctgaaggatctgtacacgccaacaacggaccacatccttcttcatcaaccgagttgttaatcttggctccatactgtaccaataaatttattctctctatgacttcatcatctgttcccgagagataatatagaggtgttttatgctgtttatcacacgcgtttggatctgcgccgtgcgtcagcagcatcgcgactattctattattattaattttagaagctatatgcaatggataatttccatcatcatccgtctcatttggagagtatcctctatgaagaagttcttcgacaaatcgttcatctagtcctttaattccacaatacgcatgtagaatgtgataattatttccagaaggttcgatagcttgtagcatattcctaaatacatctaaatttttactattatatttggcataaagagatagataatactcggccgacataatgttgtccattgtagtataaaaattaatatttctatttctatttctgtatatttgcaacaatttactctctataacaaatatcataacttagtttttttatgtcaagaaggcactggtttagttcatctataaatgtcacgccataactaccacgcatgccatactcagaattatgataaagatatttatccttggggtgtaggtaatggggattaatctttgttggatcagtctctaagttaacacatgtcacacatgatccatttatagttatatcacacgatgatgatttatgaattgattccggaagatcgctatcgtattttgtggttccacaattcatttccatacatgttattgtcacactaatattatgatgaactttatctagccgctgagtggtaaacaacagaacagatagtttattatctttaccaacaccctcagccgctgccacaaatctctgatccgtatccatgatggtcatgtttatttctagtccgtatccagtcaacactatgttagcatttctgtcgatatagctttcactcatatgacactcaccaataatagtagaattaatgtcgtaatttacaccaatagtgagttcggcggcaaagtaccaataccggtaatcttgtcgaggaggacatatagtattcttgtattctaccgaatacccgagagatgcgatacaaaagagcaagactaatttgtaaaccatcttactcaaaatatgtaacaatagtacgatgcaatgagtaagacaataggaaatctatcttatatacacataattattctatcaattttaccaattagttagtgtaatgttaacaaaaatgtgggagaatctaattagtttttctttacacaattgacgtacatgagtctgagttccttgtttttgctaattatttcatccaatttattattcttgacgatatcgagatcttttgtataggagtcaaacttgtattcaacatgcttttctataatcattttagctatttcggcatcatccaatagtacattttccagattagcagaatagatattaatgtcgtatttgaacagagcctgtaacatctcaatgtctttattatctatagccaatttaatgtccggaatgaagagaagggaattattggtgtttgtcgacgtcatatagtcgagcaagagaatcatcatatccacgtgtccattttttatagtgatgtgaatacaactaaggagaatagccagatcaaaagtagatggtatctctgaaagaaagtaggaaacaatacttacatcattaagcatgacggcatgataaaatgaagttttccatccagttttcccatagaacatcagtctccaatttttcttaacaaacagttttaccgtttgcatgttaccactatcaaccgcataatacaatgcggtgtttcccttgtcatcaaattgtgaatcatccagtccactgaatagcaaaatctttactattttggtatcttccaatgtggctgcctgatgtaatggaaattcattctctagaagatttttcaatgctccagcgttcaacaacgtacatactagacgcacgttattatcagctattgcataatacaaggcactatgtccatggacatccgccttaaatgtatctttactagagagaaagcttttcagctgcttagacttccaagtattaattcgtgacagatccatgtctgaaacgagacgctaattagtgtatattttttcattttttataattttgtcatattgcaccagaattaataatatctttaatagatctgattagtagatacatggctatcgcaaaacaacatatacacatttaataaaaataatatttattaagaaaattcagatttcacgtacccatcaatataaataaaataatgattccttacaccgtacccatattaaggagattccaccttacccataaacaatataaatccagtaatatcatgtctgatgatgaacacaaatggtgtattaaattccagtttttcaggagatgatctcgccgtagctaccataatagtagatgcctctgctacagttccttgttcgtcgacatctatctttgcattctgaaacattttataaatatataatgggtccctagtcatatgtttaaacgacgcattatctggattaaacatactaggagccatcatttcggctatcgacttaatatccctcttattttcgatagaaaatttagggagtttaagattgtacactttattccctaattgagacgaccaatagtctaattttgcagccgtgatagaatctgtgaaatgggtcatattatcacctattgccaggtacatactaatattagcatccttatacggaaggcgtaccatgtcatattctttgtcatcgattgtgattgtatttccttgcaatttagtaactacgttcatcatgggaaccgttttcgtaccgtacttattagtaaaactagcattgcgtgttttagtgatatcaaacggatattgccatatacctttaaaatatatagtattaatgattgcccatagagtattattgtcgagcatattagaatctactacattagacataccggatctacgttctactatagaattaattttattaaccgcatctcgtctaaagtttaatctatataggccgaatctatgatattgttgataatacgacggtttaatgcacacagtattatctacgaaactttgataagttagatcagtgtacgtatatttagatgttttcagcttagctaatcctgatattaattctgtaaatgctggacccagatctctttttctcaaatccatagtcttcaataattctattctagtattacctgatgcaggcaatagcgacataaacatagaaaacgaataaccaaacggtgagaagacaatattatcatcttgaatatttttatacgctactataccggcattggtaaatccttgtagacgataggcggacgctgaacacgctaacgatagtatcaataacgcaatcatgattttatggtattaataattaaccttatttttatgttcggtataaaaaaattattgatgtctacacatccttttgtaattgacatctatatatccttttgtataatcaactctaatcactttaacttttacagttttccctaccagtttatccctatattcaacatatctatccatatgcatcttaacactctctgccaagatagcttcagagtgaggatagtcaaaaagataaatatatagagcataatcattctcgtatactctgccctttattacatcacccgcattgggcaacgaataacaaaatgcaagcatcttgttaacgggctcgtaaattgggataaaaattatgtttttattgtcttatatctattttattcaagagaatattcaggaatttctttttccggttgtatctcgtcgcagtatatatcatttgtacattgtttcatattttttaatagtttacaccttttagtaggactagtatcgtacaattcatagctgtattttgaattccaatcacgcataaaaatatcttccaattgttgacgaagacctaatccatcatccggtgtaatattaatagatgctccacatgtatccgtaaagtaatttcctgtccaatttgaggtacctatataggccgttttatcggttaccatatatttggcatggtttaccctagaatacggaatgggaggatcagcatctggtacaataaatagctttacttctatatttatgtttttagattttagcatagcgatagatcttaaaaagtttctcatgataaacgaagatcgttgccagcaactaatcaatagcttaacggatacttgtctgtctatagcggatcttcttaattcatcttctatataaggccaaaacaaaattttacccgccttcgaataaataatagggataaagttcataacagatacataaacgaatttactcgcatttctaatacatgacaataaagcggttaaatcattggttctttccatagtacatagttgttgcggtgcagaagcaataaatacagagtgtggaacgccgcttacgttaatactaagaggatgatctgtattataatacgacggataaaagtttttccaattatatggtagattgttaactccaagataccagtatacctcaaaaatttgagtgagatccgctgccaagttcctattattgaagatcgcaatacccaattccttgacctgagttagtgatctccaatccatgttagcgcttcctaaataaatatgtgtattatcagatatccaaaattttgtatgaagaactcctcctaggatatttgtaatatctatgtatcgtacttcaactccggccatttgtagtctttcaacatcctttaatggtttgttagatttattaacggctactctaactcgtactcctcttttgggtaattgtacaatctcgtttaatattatcgtgccgaaattcgtacccacttcatccgataaactccaataaaaagatgatatatctagtgtttttgtggtattggatagaatttccctccacatgttaaatgtagacaaatatactttatcaaattgcatacctataggaatagtttctgtaatcactgcgattgtattatccggattcattttatttgttaaaagaataatcctatatcacttcactctattaaaaatccaagtttctatttctttcatgactgattttttaacttcatccgtttccttatgaagatgatgtttggcaccttcataaatttttatttctctattacaatttgcatgttgcatgaaataatatgcacctaaaacatcgctaatcttattgtttgttccctggagtatgagagtcggggggtgttaatcttggaaattatttttctaaccttgttggtagccttcaagacctgactagcaaatccagccttaattttttcatgattgactaatgggtcgtattggtatttataaactttatccatatctctagatactgattctggacatagctttccgactggcgcatttggtgtgatggttcccataagtttggcagctagcagattcagtcttgaaacagcatctgcattaactagaggagacattagaatcattgctgtaaacaagtttggattatcgtaagaggctagctcccatggaatgacccaataagtagatttaatagttaccacgtgctgtaccaaagtcatcaatcatcattttttcaccattacttcttccatgtccaatatgatcatgtgagaatactaaaattcctaacgatgatatgttttcagctagttcgtcataacgtccagaatgtttaccagctccatgacttatgaatactaatgccttaggatatgtaataggtttccaatatttacaatatatgtaatcattgtccagattgaacatacagtttgcactcatgattcacgttatataactatcaatattaacagttcgtttgatgatcatattatttttatgttttattgataattgtaaaaacatacaattaaatcaatatagaggaaggagacggctactgtcttttgtaagatagtcatggcgactaaattagattatgaggatgctgttttttactttgtggatgatgataaaatatgtagtcgcgactccatcatcgatctaatagatgaatatattacgtggagaaatcatgttatagtgtttaacaaagatattaccagttgtggaagactgtacaaggaattgatgaagttcgatgatgtcgctatacggtactatggtattgataaaattaatgagattgtcgaagctatgagcgaaggagaccactacatcaattttacaaaagtccatgatcaggaaagtttattcgctaccataggaatatgtgctaaaatcactgaacattggggatacaaaaagatttcagaatctagattccaatcattgggaaacattacagatttgatgaccgacgataatataaacatcttgatactttttctagaaaaaaaattgaattgatgatataggggtcttcataacgcataattattacgttagcattctatatccgtgttaaaaaaaattatcctatcatgtatttgagagttttatatgtagcaaacatgatagctgtgatgccaataagctttagatattcacgcgtgctagtgttagggatggtattatctggtggtgaaatgtccgttatataatctacaaaacaatcatcgcatatagtatgcgatagtagagtaaacatttttatagtttttactggattcatacatcgtctacccaattcggttataaatgaaattgtcgccaatcttacacccaaccccttgttatccattagcatagtattaacttcgttatttatgtcataaactgtaaatgattttgtagatgccatatcatacatgatattcatgtccctattataatcattactaactttatcacaatatatgttgataatatctatatatgatctagtctttgtgggcaactgtctatacaagtcgtctaaacgttgtttactcatatagtatcgaacagccatcattacatggtcccgttccgttgatagataatcgagtatgttagtggacttgtcaaatctatataccatattttctggaagtggatatacatagtcgtgatcaacattattgctagcctcatcttctatatcctgtactataccattatctatatcatctacataatctatgatattattacacataaacatcgacaacatactattgtttattatctaagtcctgttgatccaaacccttgatctcctctatttgtactatctagagattgtacttcttccagttctggataatatatacgttgatagattagctgagctattctatctccagtatttacattaaacgtacattttccattattaataagaatgactcctatgtttcccctataatcttcgtctattacaccacctcctatatcaatgccttttagtgacagaccagacctaggagctattctaccatagcagaacttaggcatggacatactaatatctgtcttaattaactgtctttctcctggagggatagtataatcgtaagcgctatacaaatcatatccggcagcacccggcgattgcctagtaggagatttagctctgttagtttccttaacaaatctaactggtgagttaatattcatgttgaacataaaactaatattttatttcaaaattatttaccatcccatatattccatgaataagtgtgatgattgtacacttctatagtatctatatacgatccacgataaaatcctcctatcaatagcagtttattatccactatgatcaattctggattatccctcggataaataggatcatctatcagagtccatgtattgctggattcacaataaaattccgcatttctaccaaccaagaataaccttctaccgaacactaacgcgcatgatttataatgaggataataagtggatggtccaaactgccactgatcatgattgggtagcaaatattctgtagttgtatcagtttcagaatgtcctcccattacgtatataacattgtttatggatgccactgctggattacatctaggtttcagaagactcggcatattaacccaagcagcatccccgtggaaccaacgctcaacagatgtgggatttggtagacctcctactacgtataatttattgttagcgggtatcccgctagcatacagtctggggctattcatcggaggaattggaatccaattgtttgatatataatttacagctatagcattgttatgtatttcattgttcatccatccaccgatgagatatactacttctccaacatgagtacttgtacacatatggaatatatctataatttgatccatgttcataggatactctatgaatggatacttgtatgatttgcgtggttgtttatcacaatgaaatattttggtacagtctagtatccattttacattatttatacctctgggagaaagataatttgacctgattacatttttgataaggagtagcagatttcctaatttatttcttcgcctcatataccacttaatgacaaaatcaactacataatcctcatctggaacatttagttcatcgctttctagaataagtttcatagatagataatcaaaattgtctatgatgtcatcttccagttccaaaaagtgtttggcaataaagtttttagtatgacataagagattggatagtccgtattctatacccatcatgtaacactcgacacaatattcctttctaaaatctcgtaagataaagtttatacaagtgtagatgataaattctacagaggttaatatagaagcacgtaataaattgacgacgttatgactatctatatatacctttccagtatatgagtaaataactatagaagttaaactgtgaatgtcaaggtctagacaaacccttgtaactggatctttatttttcgtgtatttttgacgtaaatgtgtgcgaaagtaaggagataactttttcaatatcgtagaattgactattatattgcctcctatggcatcaataattgttttgaatttcttagtcatagacaatgctaatatattcttacagtacacagtattgacaaatatcggcatttatgtttctttaaaagtcaacatctagagaaaaatgattatctttttgagacataactcccattttttggtattcacccacacgtttttcgaaaaaattagtttttccttccaatgatatattttccatgaaatcaaacggattggtaacattataaatttttttaaatcccaattcagaaatcaatctatccgcgacgaattctatatatgttttcatcatttcacaattcattcctataagtttaactggaagagccgcagtaagaaattcttgttcaatggatactgcatctgttataatagatctaacggtttcttcactcggtggatgcaataaatgtttaaacatcaaacatgcgaaatcgcagtgcagaccctcgtctctactaattagttcgttggaaaacgtgagtccgggcattaggccacgctttttaagccaaaatatggaagcgaatgatccagaaaagaaaattccttctactgcagcaaaggcaataagtctctctccataaccggcgctgtcatgtatccacttttgagcccaatcggccttcttttttacacaaggcatcgtttctatggcattaaagagatagtttttttcattactatctttaacataagtatcgatcaaaagactatacatttccgaatgaatgttttcaatggccatctgaaatccgtagaaacatctagcctcggtaatctgtacttctgtacaaaatcgttccgccaaattttcattcactattccgtcactggctgcaaaaaacgccaatacatgttttataaaatatttttcgtctggtgttagtttattccaatcattgatatctttagatatatctacttcttccactgtccaaaatgatgcctctgcctttttatacatgttccagatgtcatgatattggattgggaaaataacaaatctatttggatttggtgcaaggatgggttccataactaaattaacaataacaataaattttttttcagttatctatatgcctgtacttggattttttgtacatcgatatcgccgcaatcactacaataattacaagtattattgatagcattgttattagtactatcataattaaattatctacattcatgggtgctgaataatcgttattatcatcattatcattttgtaattgtgacatcatactagataaatcgtttgcgagattgttgtgggaagcgggcatggaggatgcattatcattattatttaacgccttccatttggattcacaaatgttacgcacattcaacattttatggaaactataattttgtgaaaacaaataacaagaaaactcgtcatcgttcaaatttttaacgatagtaaaccgattaaacgtcgagctaatttctaacgctagcgactctgttggatatgggtttccagatatatatcttttcagttcccctacgtatctataatcatctgtaggaaatggaagatatttccatttatctactgttcctaatatcatatgtggtggtgtagtagaaccattaagcgcgaaagatgttatttcgcatcgtattttaacttcgcaataatttctggttagataacgcactctaccagtcaagtcaatgatattagcctttacagatatattcatagtagtcgtaacgatgactccatcttttagatgcgatactcctttgtatgtaccagaatcttcgtacctcaaactcgatatatttaaacaagttaatgagatattaacgcgttttatgaatgatgatatataaccagaagttttatcctcggtggctagcgctataaccttatcattataataccaactagtgtgattaatatgtgacacgtcagtgtgggtacaaatatgtacattatcgtctacgtcgtattcgatacatccgcatacagccaacaaatataaaatgacaaatactctaacgccgttcgtacccatcttgatgcggtttaataaatgttttgatttcaatttattgtaaaaaaagattcggttttatactgttcgatattctcattgcttatattttcatctatcatctccacacagtcaaatccgtggttagcatgcacctcatcaaccggtaaaagactatcggactcttctatcattataactctagaatatttaatttggtcattattaatcaagtcaattatcttatttttaacaaacgtgagtattttactcattttttataaaaacttttagaaatatacagactctatcgtgtgtctatatcttctttttatatccaatgtatttatgtctgatttttcttcatttatcatatataatggtccaaattctacacgtgcttcggattcatccagatcattaaggttcttataattgtaacatccttctcttccctcttctacatcttccttcttattcttattcttagcgtcacagaatctaccacagcaggatcccatgacgagcgtcatattaaactaatccattttcaattataatatatgattagtaatgaccattaaaataaaaaatattcttcataaccggcaagaaagtgaaaagttcacattgaaactatgtcagtagtatacatcatgaaatgatgatatatatatactctattttggtggaggattatatgatataattcgtggataatcatttttaagacacatttctttattcgtaaatcttttcacgttaaatgagtgtccatattttgcaatttcttcatatgatggcggtgtacgtggacgaggctgctcctgttcttgttgtggtcgccgactgtcgtgtctgcgtttagatccctccattatcgcgattgcgtagatggagtactattttataccttgtaattaaatttttttattaattaaacgtataaaaacgttccgtatctgtatttaagagccagatttcgtctaatagaacaaatagctacagtaaaaataactagaataattgctacacccactagaaaccacggatcgtaatacggcaatcggttttcgataataggtggaacgtatattttatttaaggacttaacaattgtctgtaaaccacaatttgcttccgcggatcctgtattaactatctgtaaaagcatatgttgaccgggcggagccgaacattctccgatatctaatttctgtatatctataatattattaacctccgcatacgcattacagttcttttctagcttggataccgcactaggtacatcgtctagatctattcctatttcctcagcgatagctcttctatccttttccggaagcaatgaaatcacttcaataaatgattcaaccatgagtgtgaaactaagtcgagaattactcatgcatttgttagttattcggagcgcgcaatttttaaactgtcctataacctctcctatatgaatagcacaagtgacattagtagggatagaatgttgagctaatttttgtaaataactatctataaaaagattatacaaagttttaaactctttagtttccgccatttatccagtctgagaaaatgtctctcataataaatttttccaagaaactaattgggtgaagaatggaaacctttaatctatatttatcacagtctgttttggtacacatgatgaattcttccaatgccgtactaaattcgatatctttttcgatttctggatatgtttttaataaagtatgaacaaagaaatggaaatcgtaataccagttatgtttaactttgaaattgttttttattttcttgttaatgattccagccacttgggaaaagtcaaagtcgtttaatgccgatttaatacgttcattaaaaacaaactttttatcctttagatgaattattattggttcattggaatcaaaaagtaagatattatcgggtttaagatctgcgtgtaaaaagttgtcgcaacagggtagttcgtagattttaatgtataacagagccatctgtaaaaagataaactttatgtattgtaccaaagatttaaatcctaatttgatagctaactcggtatctactttatctgccgaatacagtgctaggggaaaaattataatgtttcctctttcatattcgtagttagttctcttttcatgttcgaaaaagtgaaacatgcggttaaaatagtttataacattaatattactgttaataactgccggataaaagtgggatagtaatttcacgaatttgatactgtcctttctctcgttaaacgcctttaaaaaaactttagaagaatatctcaatgagagttcctgaccatccatagtttgtatcaataatagcaacatatgaagaacacgtttatacagagtatgtaaaaatgttaatttatagtttaatcccatggcccacgcacacacgattaattttttttcatctccctttagattgttgtatagaaatttgggtactgtgaactccgccgtagtttccatgggactatataattttgtggcctcgaatacaaattttactacatagttatctatcttaaagactataccatatcctcctgtagatatgtgataaaaatcgtcgtttataggataaaatcgtttatccttttgttggaaaaaggatgaattaatgtaatcattctcttctatctttagtagtgtttccttattaaaattcttaaaataatttaacaatctaactgacggagcccaattttggtgtaaatctaattgggacattatattgttaaaatacaaacagtctcctaatataacagtatctgataatctatggggagacatccattgatattcaggggatgaatcattggcaacacccatttattgtacaaaaagccccaatttacaaacgaaagtccaggtttgatagagacaaacaattaactattttgtctctgtttttaacacctccacagtttttaatttctttagtaatgaaattattcacaatatcagtatcttctttatctaccagagattttactaacttgataaccttggctgtctcattcaatagggtagtaatatttgtatgtgtgatattgatatctttttgaattgtttcttttagaagtgattctttgatggtgccagcatacgaattacaataatgcagaaactcggttaacatgcaggaattatagtaagccaattccaattgttgcctgtgttgtattagagtgtcaatatgagcaatggtgtccttgcgtttctctgatagaatgcgagcagcgattttggcgttatcatttgacgatatttctggaatgacgaatcctgtttctactaactttttggtaggacaaagtgaaacaatcaagaagatagcttctcctcctatttgtggaagaaattgaactcctctagatgatctactgacgatagtatctccttgacagatattggaccgaattacagaagtacctggaatgtaaagccctgaaaccccctcattttttaagcagattgttgccgtaaatcctgcactatgcccaagatagagagctcctttggtgaatccatctctatgtttcagtttaaccaagaaacagtcagctggtctaaaatttccatctctatctaatacagcatctaacttgatgtcaggaactatgaccggtttaatgttatatgtaacattgagtaaatccttaagttcataatcatcactgtcatcagttatgtacgatccaaacaatgtttctaccggcatagtggatacgaagatgctatccatcagaatgtttccctgattagtattttctatatagctattcttctttaaacgattttccaaatcagtaactatgttcatttttttaggagtaggacgcctagccagtatggaagaggattttctagatcctctcttcaacatctttgatctcgatggaatgcaaaaccccatagtgaaacaaccaacgataaaaataatattgtttttcactttttataattttaccatctgactcatggattcattaatatctttataagagctactaacgtataattctttataactgaactgagatatatacaccggatctatggtttccataattgagtaaatgaatgctcggcaataactaatggcaaatgtatagaacaacgaaattatactagagttgttaaagttaatattttctatgagctgttccaataaattatttgttgtgactgcgttcaagtcataaatcatcttgatactatccagtaaaccgtttttaagttctggaatattatcatcccattgtaaagcccctaattcgactatcgaatatcctgctctgatagcagtttcaatatcgacggacgtcaatactgtaataaaggtggtagtattgtcatcatcgtgataaactacgggaatatggtcgttagtaggtacggtaactttacacaacgcgatatataactttccttttgtaccatttttaacgtagttgggacgtcctgcagggtattgttttgaagaaatgatatcgagaacagatttgatacgatatttgttggattcctgattattcactataatataatctagacagatagatgattcgataaatagagaaggtatatcgttggtaggataatacatccccattccagtattctcggatactctattgatgacactagttaagaacatgtcttctattctagaaaacgaaaacatcctacatggactcattaaaacttctaacgctcctgattgtgtctcgaatgcctcgtacaaggatttcaaggatgccatagattctttgaccaacgatttagaattgcgtttagcatctgatttttttattaaatcgaatggtcggctctctggtttgctaccccaatgataacaatagtcttgtaaagataaaccgcaagaaaatttatacgcatccatccaaataaccctagcaccatcggatgatattaatgtattattatagattttccatccacaattattgggccagtatactgttagcaacggtatatcgaatagattactcatgtaacctactagaatgatagttcgtgtactagtcataatatctttaatccaatctaaaaaatttaaaattagattttttacactgttaaagttaacaaaagtattacccgggtacgtggatatcatatatggcattggtccattatcagtaatagctccataaactgatacggcgatggtttttatatgtgtttgatctaacgaggaagaaattcgcgcccacaattcatctctagatatgtatttaatatcaaacggtaacacatcaatttcgggacgcgtatatgtttctaaatttttaatccaaatataatgatgacctatatgccctattatcatactgtcaactatagtacacctagggaacttacgatacatctgtttcctataatcgttaaattttacaaatctataacatgctaaaccttttgacgacagccattcattaatttctgatatggaatctgtattctcgataccgtatcgttctaaagccagtgctatatctccctgttcgtgggaacgctttcgtataatatcgatcaacggataatctgaagtttttggagaataatatgactcatgatctatttcgtccataaacaatctagacataggaattggaggcgatgatcttaattttgtgcaatgagtcgtcaatcctataacttctaatcttgtaatattcatcatcgacataatactatctatgttatcatcgtatattagtataccatgaccttcttcatttcgtgccaaaatgatatacagtcttaaatagttacgcaatatctcaatagtttcataattgttagctgttttcatcaaggtttgtatcctgtttaacatgatggcgttctataacgtctctattttctatttttaattttttaaatttttaacgatttactgtggctagatacccaatctctctcaaatatttttttagcctcgcttacaagctgtttatctatactattaaaactgacgaatccgtgattttggtaatgggttccgtcgaaatttgccgaagtgatatgaacatattcgtcgtcgactatcaacaattttgtattattctgaatagtgaaaaccttcacagatagatcattttgaacacacaacgcatctagacttttggcggttgccatagaatatacgtcgttcttatcccaattaccaactagaagtctgatcttaactcctctattaatggctgcttctataatggagttgtaaatgtcgggccaatagtagctattaccgtcgacacgtgtagtgggaactatggccaaatgttcaatatctatactagtcttagctgacctgagtttatcaataactacatcggtatctagatctctagaatatcccaataggtgttccggagaatcagtaaagaacactccacctataggattcttaatatgatacgcagtgctaactggcaaacaacaagccgcagagcataaattcaaccatgaattttttgcgctattaaaggctttaaaagtatcaaatcttctacgaagatctgtggccagcgggggataatcagaatatacacctaacgttttaatcgtatgtatagatcctccagtaaatgacgcgtttcctacataacatctttcatcatctgacacccaaaaacaaccgagtagtagtcccacattattttttttatctatattaacggttataaaatttatatccgggcagtgactttgtagctctcccagatttcttttccctcgttcatctagcaaaactattattttaatccctttttcagatgcctcttttagtttatcaaaaataagcgctcccctagtcgtactcagaggattacaacaaaaagatgctatgtatatatatttcttagctagagtgataatttcgttaaaacattcaaatgttgttaaatgatcggatctaaaatccatattttctggtagtgtttctaccagcctacattttgctcccgcaggtaccgatgcaaatggccacatttagttaacataaaaacttatacatcctgttctatcaacgattctagaatatcatcggctatatcgctaaaattttcatcaaagtcgacatcacaacctaactcagtcaatatattaagaagttccatgatgtcatcttcgtctatttctatatccgtatccattgtagattgttgaccgattatcgagtttaaatcattactaatactcaatccttcagaatacaatctgtgtttcattgtaaatttataggcggtgtatttaagttggtagattttcaattatgtattaatatagcaacagtagttcttgctcctccttgattctagcatcctcttcattattttcttctacgtacataaacatgtccaatacgttagacaacacaccgacgatggcggccgcagatctcgagttatgatctacttccttaccgtgcaataaattagaatatattttctacttttacgagaaattaattattgtatttattatttatgggtgaaaaacttactataaaaagcgggtgggtttggaattagtgaaagcttaaaaattgaaattttattttttttttttggaatataaataagctcgaagtcgacagatctaggcctggtaccaggaggaggaattcagcttaaagatgacttcgaaagtttatgatccagaacaaaggaaacggatgataactggtccgcagtggtgggccagatgtaaacaaatgaatgttcttgattcatttattaattattatgattcagaaaaacatgcagaaaatgctgttatttttttacatggtaacgcggcctcttcttatttatggcgacatgttgtgccacatattgagccagtagcgcggtgtattataccagatcttattggtatgggcaaatcaggcaaatctggtaatggttcttataggttacttgatcattacaaatatcttactgcatggtttgaacttcttaatttaccaaagaagatcatttttgtcggccatgattggggtgcttgtttggcatttcattatagctatgagcatcaagataagatcaaagcaatagttcacgctgaaagtgtagtagatgtgattgaatcatgggatgaatggcctgatattgaagaagatattgcgttgatcaaatctgaagaaggagaaaaaatggttttggagaataacttcttcgtggaaaccatgttgccatcaaaaatcatgagaaagttagaaccagaagaatttgcagcatatcttgaaccattcaaagagaaaggtgaagttcgtcgtccaacattatcatggcctcgtgaaatcccgttagtaaaaggtggtaaacctgacgttgtacaaattgttaggaattataatgcttatctacgtgcaagtgatgatttaccaaaaatgtttattgaatcggatccaggattcttttccaatgctattgttgaaggcgccaagaagtttcctaatactgaatttgtcaaagtaaaaggtcttcatttttcgcaagaagatgcacctgatgaaatgggaaaatatatcaaatcgttcgttgagcgagttctcaaaaatgaacaagcggccgccgccaccatgagcaagggcgaggaactgttcactggcgtggtcccaattctcgtggaactggatggcgatgtgaatgggcacaaattttctgtcagcggagagggtgaaggtgatgccacatacggaaagctcaccctgaaattcatctgcaccactggaaagctccctgtgccatggccaacactggtcactaccttcacctatggcgtgcagtgcttttccagatacccagaccatatgaagcagcatgactttttcaagagcgccatgcccgagggctatgtgcaggagagaaccatctttttcaaagatgacgggaactacaagacccgcgctgaagtcaagttcgaaggtgacaccctggtgaatagaatcgagctgaagggcattgactttaaggaggatggaaacattctcggccacaagctggaatacaactataactcccacaatgtgtacatcatggccgacaagcaaaagaatggcatcaaggtcaacttcaagatcagacacaacattgaggatggatccgtgcagctggccgaccattatcaacagaacactccaatcggcgacggccctgtgctcctcccagacaaccattacctgtccacccagtctgccctgtctaaagatcccaacgaaaagagagaccacatggtcctgctggagtttgtgaccgctgctgggatcacacatggcatggacgagctgtacaagtgagcggccgccctgctagcaagcttgctagcggccgctcgagatctgcggccgctacagacacgaatatgactaaaccgatgaccatttaaaaacccctctctagctttcacttaaactgtatcgatcattcttttagcacatgtataatataaaaacattattctatttcgaatttaggcttccaaaaatttttcatccgtaaaccgataataatatatatagacttgttaatagtcggaataaatagattaatgcttaaactatcatcatctccacgattagagatacaatatttacattctttttgctgtttcgaaactttatcaatacacgttaatacaaacccaggaaggagatattgaaactgaggctgttgaaaatgaaacggtgaatacaataattcagataatgtaaaatcatgattccgtattctgatgatattagaactgctaatggatgtcgatggtatgtatctaggagtatctattttaacaaagcatcgatttgctaatatacaattatccttttgattaattgttattttattcatattcttaaaaggtttcatatttatcaattcttctacattaaaaatttccatttttaatttatgtagccccgcaatactcctcattacgtttcattttttgtctataatatccattttgttcatctcggtacatagattatccaattgagaagcgcatttagtagttttgtacattttaagtttattgacgaatcgtcgaaaactagttatagttaacattttattatttgataccctgatattaatacccctgccgttactattatttataactgatgtaatccacgtaacattggaattaactatcgatagtaatgcatcgacgcttccaaaattgtctattataaactcaccgataatttttttattgcatgttttcatattcattaggattatcaaatctttaatcttattacgattgtatgcgttgatattacaagacgtcattctaaaagacggaggatctccatcaaatgccagacaatcacgtacaaagtacatggaaataggttttgttctattgcgcatcatagatttatatagaacacccgtagaaatactaatttgttttactctataaaatactaatgcatctatttcatcgttttgtataacgtctttccaagtgtcaaattccaaatttttttcattgatagtaccaaattcttctatctctttaactacttgcatagataggtaattacagtgatgcctacatgccgttttttgaaactgaatagatgcgtctagaagcgatgctacgctagtcacaatcaccactttcatatttagaatatatatatgtaaaaatatagtagaatttcattttgtttttttctatgctataaatgaattctcattttgcatctgctcatactccgttttatattaataccaaagaaggaagatatctggttctaaaagccgttaaagtatgcgatgttagaactgtagaatgcgaaggaagtaaagcttcctgcgtactcaaagtagataaaccctcatcgcccgcgtgtgagagaagaccttcgtccccgtccagatgcgagagaatgaataaccctggaaaacaagttccgtttatgaggacggacatgctacaaaatatgttcgcggctaatcgcgataatgtagcttctagacttttgtcctaaaatactattatatccttttcgatattaataaatccgtgtcgtccaggttttttatctctttcagtatgtgaatagataggtattttatctctattcatcatcgaatttaagagatccgataaacattgtttgtattctccagatgtcagcatctgatacaacaatatatgtgcacataaacctctggcacttatttcatgtaccttccccttatcactaaggagaatagtatttgagaaatatgtatacatgatattatcatgaattagatatacagaatttgtaacactctcgaaatcacacgatgtgtcggcgttaagatctaatatatcactcgataacacattttcatctagatacactagacattttttaaagctaaaatagtctttagtagtaacagtaactatgcgattattttcatcgatgatacatttcatcggcatattattacgcttaccatcaaagactataccatgtgtatatctaacgtattctagcatggttgccatacgcgcattaaacttttcaggatctttggatagatcttccaatctatctatttgagaaaacatttttatcatgttcaatagttgaaacgtcggatccactatatagatattatctataaagattttaggaactacgttcatggtatcctggcgaatattaaaactatcaatgatatgattatcgttttcatcttttatcaccatatagtttctaagatatgggattttacttaatataatattatttcccgtgataaattttattagaaaggccaaatctataagaaaagtcctagaattagtctgaagaatatctatatcgccgtatagtatatttggattaattagatatagagaatatgatccgtaacatatacaacttttattatggcgtctaagatattcttccatcaacttattaacatttttgactagggaagatacattatgacgtcccattacttttgccttgtctattactgcgacgttcatagaatttagcatatctcttgccaattcttccattgatgttacattataagaaattttagatgaaattacatttggagctttaatagtaagaactcctaatatgtccgtgtatgtggtcactaatacagattgtagttctataatcgtaaataatttacctatattatatgtttgagtctgtttagaaaagtagctaagtatacgatcttttatttctgatgcagatgtattaacatcggaaaaaaatctttttttattcttttttactaaagatacaaatatgtctttgttaaaaacagttattttctgaatatttctagcttgtaattttaacatatgatattcgttcacactaggtactctgcctaaataggtttctataatctttaatgtaatattaggaaaagtattctgatcaggattcctattcattttgaggatttaaaactctgattattgtctaatatggtctctacgcaaactttttcacagagcgatagagtttttgataactcgtttttcttaagaaatataaaactactgtctccagagctcgctctatcttttattttatctaattcgatacaaactcctgatactggttcagaaagtaattcattaattttcagtcctttatagaagatatttaatatagataatacaaaatcttcagtttttgatatcgatctgattgatcctagaactagatatattaataacgtgctcattaggcagtttatggcagcttgataattagatatagtatattccagttcatatttattagataccgcattgcccagattttgatattctatgaattcctctgaaaataaatccaaaataactagacattctattttttgtggattagtgtactctcttccctctatcatgttcactactggtgtccacgatgataaatatctagagggaatataatatagtccataggatgccaatctagcaatgtcgaataactgtaattttattcttcgctcttcattatgaattgattcttgaggtataaacctaacacaaattatattattagacttttcgtatgtaatgtctttcatgttataagtttttaatcctggaatagaatctattttaatgaggcttttaaacgcagagttctccaacgagtcaaagcataatactctgttgtttttcttatatacgatgttacgattttcttctttgaatggaataggtttttgaattagtttataattacaacataatagataaggaagtgtgcaaatagtacgcggaaaaaacataatagctcccctgttttcatccatggttttaagtaaatgatcactggcttctttagtcaatggatattcgaacattaaccgtttcatcatcattggacagaatccatatttcttaatgtaaagagtgatcaaatcattgtgtttattgtaccatcttgttgtaaatgtgtattcggttatcggatctgctcctttttctattaaagtatcgatgtcaatctcgtctaagaattcaactatatcgacatatttcatttgtatacacataaccattactaacgtagaatgtataggaagagatgtaacgggaacagggtttgttgattcgcaaactattctaatacataattcttctgttaatacgtcttgcacgtaatctattatagatgccaagatatctatataattattttgtaagatgatgttaactatgtgatctatataagtagtgtaataattcatgtattttgatatatgttccaactctgtctttgtgatgtctagtttcgtaatatctatagcatcctcaaaaaatatattcgcatatattcccaagtcttcagttctatcttctaaaaaatcttcaacgtatggaatataataatctattttacctcttctgatatcattaatgatatagtttttgacactatcttctgtcaattgattcttattcactatatctaagaaacggatagcgtccctaggacgaactactgccattaatatctctattatagcttctggacataattcatctattataccagaattaatgggaactattccgtatctatctaacatagttttaagaaagtcagaatctaagacttgatgttcatatattggttcatacatgaaatgatctctattgatgatagtgactatttcattctctgaaaattggtaactcattctatatatgctttccttgttgatgaaggatagaatatactcaatagaatttgtaccaacaaactgttctcttatgaatcgtatatcatcatctgaaataatcatgtaaggcatacatttaacaattagagacttgtctcctgttatcaatatactattcttgtgataatttatgtgtgaggcaaatttgtccacgttctttaattttgttatagtagatatcaaatccaatggagctacagttcttggcttaaacagatatagtttttctggaacaaattctacaacattattataaaggactttgggtagataagtgggatgaaatcctattttaattaatgcgatagccttgtcctcgtgcagatatccaaacgcttttgtgatagtatggcattcattgtctagaaacgctctacgaatatctgtgacagatatcatctttagagaatatactagtcgcgttaatagtactacaatttgtattttttaatctatctcaataaaaaaattaatatgtatgattcaatgtataactaaactactaactgttattgataactagaatcagaatctaatgatgacgtaaccaagaagtttatctactgccaatttagctgcattatttttagcatctcgtttagattttccatcggccttatcgaatactcttccgtcgatgtctacacaggcataaaatgtaggagagttactaggcccaactgattcaatacgaaaagaccaatctctcctagtaatttggcagtactcattaataacggtgacagggttagcatctttccaatcaataatttttttagccggaataacatcatcaaaagacttatgatcctctctcattgatttttcgcgggatacatcatctattatgacgtcagccatagcatcagcatccggcttatccgcctccgttgtcataaaccaacgaggaggaatatcgtcggagctgtacaccatagcactacgttgaagatcgtacagagctttattaacttctcgcttctccatattaagttgtctagttagttgtgcagcagtagctccttcgattccaatgtttttaatagccgcacacacaatctctgcgtcagaacgctcgtcaatatagatcttagacatttttagagagaactaacgcaaccagcaataaaactgaacctactttatcatttttttattcatcatcctctggtggttcgtcgttcctatcaaatgtagctctgattaacccgtcatctataggtgatgctggttctggagattctggaggagatggattattatctggaagaatctctgttatttccttgttttcatgtatcgattgcgttgtaacattaagattgcgaaatgctctaaatttgggaggcttaaagtgttgtttgcaatctctacacgcgtgtctaactagtggaggttcgtcagctgctctagtttgaatcatcatcggcgtagtattcctacttttacagttaggacacggtgtattgtatttctcgtcgagaacgttaaaataatcgttgtaactcacatcctttattttatctatattgtattctactcctttcttaatgcattttataccgaataagagatagcgaaggaattctttttcggtgccgctagtacccttaatcatatcacatagtgttttatattccaaatttgtggcaatagacggtttatttctatacgatagtttgtttctggaatcctttgagtattctataccaatattattctttgattcgaatttagtttcttcgatattagattttgtattacctatattcttgatgtagtactttgatgatttttccatggcccattctattaagtcttccaagttggcatcatccacatattgtgatagtaattctcggatatcagtagcggctaccgccattgatgtttgttcattggatgagtaactactaatgtatacattttccatttataacacttatgtattaactttgttcatttatattttttcattattatgttgatattaacaaaagtgaatatatatatgttaataattgtattgtggttatacggctacaattttataatgagtgaaagtcagtgtccgatgatcaatgacgatagctttactctgaaaagaaagtatcaaatcgatagtgcggagtcaacaataaaaatggataagaagaggataaagtttcagaatagagccaaaatggtaaaagaaataaatcagacaataagagcagcacaaactcattacgagacattgaaactaggatacataaaatttaagagaatgattatgactactactctagaagatatagcaccatctattccaaataatcagaaaacttataaactattctcggacatttcagccatcggcaaagcatcacagaatccgagtaagatggtatatgctctgctgctttacatgtttcccaatttgtttggagatgatcatagattcattcgttatagaatgcatccaatgagtaaaatcaaacacaagatcttctctcctttcaaacttaatcttattagaatattagtggaagaaagattctataataatgaatgcagatctaataaatggagaataattggaacacaagttgataaaatgttgatagctgaatctgataaatatacaatagatgcaaggtataacctaaaacccatgtatagaatcaagggagaatctgaagaagataccctctttatcaaacagatggtagaacaatgtgtgacatcccaggaattggtggaaaaagtgttgaagatactgtttagagatttgttcaagagtggagaatacaaagcgtacagatacgatgatgatgtagaaaatggatttattggattggatacactaaaattaaacattgttcatgatatagttgaaccatgtatgcctgttcgtaggccagtggctaagatactgtgtaaagaaatggtaaataaatactttgagaatccgctacatattattggtaaaaatcttcaagagtgcattgactttgttagtgaataggcatttcatctttctccaatactaattcaaattgttaaattaataatggatagtataaatagttattagttataagatagtaaaaataattattagaataagagtgtagtatcatagataactctcttctataaaaatggattttattcgtagaaagtatcttatatacacagtagaaaataatatagattttttaaaggatgatacattaagtaaagtaaacaattttaccctcaatcatgtactagctctcaagtatctagttagcaattttcctcaacacgttattactaaggatgtattagctaataccaatttttttgttttcatacatatggtacgatgttgtaaagtgtacgaagcggttttacgacacgcatttgatgcacccacgttgtacgttaaagcattgactaagaattatttatcgtttagtaacgcaatacaatcgtacaaggaaaccgtgcataaactaacacaagatgaaaaatttttagaggttgccgaatacatggacgaattaggagaacttataggcgtaaattatgacttagttcttaatccattatttcacggaggggaacccatcaaagatatggaaatcatttttttaaaactgtttaagaaaacagacttcaaagttgttaaaaaattaagtgttataagattacttatttgggcatacctaagcaagaaagatacaggcatagagtttgcggataatgatagacaaaatatatacactctatttcaacaaactggtagaatcgtccatagcaatctaacagaaacgtttagagattatatctttcccggagataagactagctattgggtgtggttaaacgaaagtatagctaatgatgcggatatcgttcttaatagacacgccattaccatgtatgataaaattcttagttatatatactctgagataaaacaaggacgcgttaataaaaacatgcttaagttagtttatatctttgagcctgaaaaagatatcagagaacttctgctagaaatcatatatgatattcctggagatatcctatctattattgatgcaaaaaacgacgattggaaaaaatattttattagtttttataaagctaattttattaacggtaatacatttattagtgatagaacgtttaacgaggacttattcagagttgttgttcaaatagatcccgaatatttcgataatgaacgaattatgtctttattctctacgagtgctgcggacattaaacgatttgatgagttagatattaataacagttatatatctaatataatttatgaggtgaacgatatcacattagatacaatggatgatatgaagaagtgtcaaatctttaacgaggatacgtcgtattatgttaaggaatacaatacatacctgtttttgcacgagtcggatcccatggtcatagagaacggaatactaaagaaactgtcatctataaaatccaagagtagacggctgaacttgtttagcaaaaacattttaaaatattatttagacggacaattggctcgtctaggtcttgtgttagatgattataaaggagacttgttagttaaaatgataaaccatcttaagtctgtggaggatgtatccgcattcgttcgattttctacagataaaaaccctagtattcttccatcgctaatcaaaactattttagctagttataatatttccatcatcgtcttatttcaaaggtttttgagagataatctatatcatgtagaagaattcttggataaaagcatccatctaaccaagacggataagaaatatatacttcaattgataagacacggtagatcatagaacagaccaaatatattattaataatttgtatatacatagatataattatcacacatttttgataaatgggaactgctgcaacaattcagactcccaccaaattaatgaataaagaaaatgcagaaatgattttggaaaaaattgttgatcatatagttatgtatattagtgacgaatcaagtgattcagaaaataatcctgaatatattgattttcgtaacagatacgaagactatagatctctcattataaaaagtgatcacgagtttgtaaagctatgtaaaaatcatgcggagaaaagttctccagaaacgcaacaaatgattatcaaacacatatacgaacaatatcttattccagtatctgaagtactattaaaacctataatgtccatgggtgacataattacatataacggatgtaaagacaatgaatggatgctagaacaactctctaccctaaactttaacaatctccgcacatggaactcatgtagcataggcaatgtaacgcgtctgttttatacattttttagttatctgatgaaagataaactaaatatataagtataatcccattctaatactttaacctgatgtattagcatcttattagaatattaacctaactaaaagacataacataaaaactcattacatagttgataaaaagcggtaggatataaatattatggctgccaccgttccgcgttttgacgacgtgtacaaaaatgcacaaagaagaattctagatcaagaaacattttttagtagaggtctaagtagaccgttaatgaaaaacacatatctatttgataattacgcgtatggatggataccagaaactgcaatttggagtagtagatacgcaaacctagatgctagtgactattatcccatttcgttgggattacttaaaaagttcgagtttctcatgtctctatataaaggtcctattcccgtatatgaagaaaaagtaaatactgaattcatagccaatggatcgttctctggtagatacgtatcatatcttcgaaagttttctgcccttccaacaaacgagtttattagttttttgttactgacttccattccaatctataatatcttgttctggtttaaaaacacacagtttgatattactaaacacacattattcagatacgtctatacagataatgccaaacacctggcgttggctaggtatatgcatcaaacaggagactataagcctttgtttagtcgtctcaaagagaattatatatttaccggtcccgttccaataagtatcaaagatatagatcaccctaatcttagtagagcaagaagtccatccgattatgagacattagctaatattagtactatattgtactttaccaagtatgatccggtattaatgtttttattgttttacgtacctgggtattcaattactacaaaaattactccagccgtagaatatctaatggataaactgaatctaacaaagagcgacgtacaactgttgtaaattattttatgcttcgtaaaatgtaggttttgaaccaaacattctttcaaagaatgagatgcataaaactttattatccaatagattgactatttcggacgtcaatcgtttaaagtaaacttcgtaaaatattctttgatcactgccgagtttaaaacttctatcgataattgtctcatatgttttaatatttacaagttttttggtccatggtacattagccggacaaatatatgcaaaataatatcgttctccaagttctatagtttctggattatttttattatattcagtaactaaatacatattagggttatctgcggatttataatttgagtgatgcattctactcaacataaataattctagaggagacgatctactatcaaattcggatcgtaaatctgtttctaaagaacggagaatatctatacatacctgattagaattcatccgtccttcagacaacatctcagacagtctggttttgtacatcttaatcatattcttatgaaacttggaaacatctcttctagtttcactagtacctttattaattctctcaggtacagattttgaattcgacgatgctgagtatttcatcgttgtatatttcttcttcgattgcataatcagattcttatataccgcctcaaactctattttaaaattattaaacaatactctattattaatcagtcgttctaactctttcgctatttctatagacttatctacatcttgactgtctatctctgtaaacacggagtcggtatctccatacacgctacgaaaacgaaatctgtaatctataggcaacgatgttttcacaatcggattaatatctctatcgtccatataaaatggattacttaatggattggcaaaccgtaacataccgttagataactctgctccatttagtaccgattctagatacaagatcattctacgtcctatggatgtgcaactcttagccgaagcgtatgagtatagagcactatttctaaatcccatcagaccatatactgagttggctactatcttgtacgtatattgcatggaatcatagatggccttttcagttgaactggtagcctgttttagcatctttttatatctggctctctctgccaaaaatgttcttaatagtctaggaatggttccttctatcgatctatcgaaaattgctatttcagagatgaggttcggtagtctaggttcacaatgaaccgtaatatatctaggaggtggatatttctgaagcaatagctgattatttatttcttcttccaatctattggtactaacaacgacaccgactaatgtttccggagatagatttccaaagatacacacattaggatacagactgttataatcaaagattaatacattattactaaacattttttgttttggagcaaataccttaccgccttcataaggaaacttttgttttgtttctgatctaactaagatagttttagtttccaacaatagctttaacagtggacccttgatgactgtactcgctctatattcgaataccatggattgaggaagcacatatgttgacgcacccgcgtctgtttttgtttctactccataatactcccacaaatactgacacaaacaagcatcatgaatacagtatctagccatatctaaagctatgtttagattataatccttatacatctgagctaaatcaacgtcatcctttccgaaagataatttatatgtatcattaggtaaagtaggacataatagtacgactttaaatccattttcccaaatatctttacgaattactttacatataatatcctcatcaacagtcacataattacctgtggttaaaacctttgcaaatgcagcggctttgcctttcgcgtctgtagtatcgtcaccgatgaacgtcatttctctaactcctctatttaatactttacccatgcaactgaacgcgttcttggatatagaatccaatttgtacgaatccaatttttcaaatttttgaatgaatgaatatagatcgaaaaatatagttccattattgttattaacgtgaaacgtagtattggccatgccgcctactcccttatgactagactgatttctctcataaatacagagatgtacagcttcctttttgtccggagatctaaagataattttctctcctgttaataactctagacgattagtaatatatctcagatcaaagttatgtccgttaaaggtaacgacgtagtcgaacgttagttccaacaattgtttagctattcgtaacaaaactatttcagaacatagaactagttctcgttcgtaatccatttccattagtgactgtatcctcaaacatcctctatcgacggcttcttgtatttcctgttccgttaacatctcttcattaatgagcgtaaacaataatcgtttaccacttaaatcgatataacagtaacttgtatgcgagattgggttaataaatacagaaggaaacttcttatcgaagtgacactctatatctagaaataagtacgatcttgggatatcgaatctaggtatttttttagcgaaacagttacgtggatcgtcacaatgataacatccattgttaatctttgtcaaatattgctcgtccaacgagtaacatccgtctggagatatcccgttagaaatataaaaccaactaatattgagaaattcatccatggtggcattttgtatgctgcgtttctttggctcttctatcaaccacatatctgcgacggagcattttctatctttaatatctagattataacttattgtctcgtcaatgtctatagttctcatctttcccaacggcctcgcattaaatggaggaggagacaatgactgatatatttcgtccgtcactacgtaataaaagtaatgaggaaatcgtataaatacggtctcgccatttcgacatctggatttcagatataaaaatctgttttcaccgtgactttcaaaccaattaatgcaccgaacatccatttatagaatttagaaatatattttcatttaaatgaatcccaaacattggggaagagccgtatggaccattatttttatagtactttcgcaagcgggtttagacggcaacatagaagcgtgtaaacgaaaactatatactatagttagcactcttccatgtcctgcatgtagacggcacgcgactatcgctatagaggacaataatgtcatgtctagcgatgatctgaattatatttattattttttcatcagattatttaacaatttggcatctgatcccaaatacgcgatcgatgtgacaaaggttaaccctttataaacttaacccattataaaacttatgattagtcacaactgaaataaccgcgtgattattttttggtataattctacacggcatggtttctgtgactatgaattcaacccccgttacattagtgaaatctttaacaaacagcaagggttcgtcaaagacataaaactcattgtttacaatcgaaatagaccccctatcacacttaaaataaaaaatatccttatcctttaccaccaaataaaattctgattggtcaatgtgaatgtattcacttaacagttccacaaatttatttattaactccgaggcacatacatcgtcggtattttttatggcaaactttactcttccagcatccgtttctaaaaaaatattaacgagttccatttatatcatccaatattattgaaatgacgttgatggacagatgatacaaataagaaggtacggtacctttgtccaccatctcctccaattcatgctctattttgtcattaactttaatgtatgaaaacagtacgccacatgcttccatgacagtgtgtaacactttggatacaaaatgtttgacattagtataattgtccaagactgtcaatctataatagatagtagctataatatattctatgatggtattgaagaagatgacaaccttggcatattgatcatttaacacagacatggtatcaacagatagcttgaatgaaagagaatcagtaattggaataagcgtcttctcgatagagtgtccgtataccaacatgtctgatattttgatgtattccattaaattatttagttttttctttttattctcgttaaacagcatttctgtcaacggaccccaacatcgttgaccgattaagttttgattgatttttccgtgtaaggcgtatctagtcagatcgtatagcctatccaataatccatcgtctgtgtgtagatcacatcgtacactttttaattctctatagaagagcgacagacatctggagcaattacagacagcaatttctttattctctacagatgtaagatacttgaagacattcctatgatgatgcagaattttggataacacggtattgatggtatctgttaccataattcctttgatggctgatagtgtcagagcacaagatttccaatctttgacaatttttagcaccattatctttgttttgatatctatatcagacagcatggtgcgtctgacaacacagggattaagacggaaagatgaaatgattctctcaacatcttcaatagataccttgctattttttctggcattatctatatgtgcgagaatatcctctagagaatcagtatcctttttgatgatagtggatctcaatgacatgggacgtttaaaccttcttattctatcaccagattgcatggtgatttgtcttctttcttttatcataatgtaatctctaaattcatcggcaaattgtctatatctaaaatcataatatgagatgtttacctctacaaatatctgttcgtccaatgttagagtatttacatcagttttgtattccaaattaaacatggcaacggatttaattttatattcctctattaagtcctcgtcgataataacagaatgtagataatcatttaatccgtcgtacatggttggaagatgcttgttgacaaaatctttaattgtcttgatgaaggtgggactatatctaacatcttgattaataaaatttataacattgtccataggatactttgtaactagttttatacacatctcttcatcggtaagtttagacagaatatcgtgaacaggtggtatattatattcatcagatatacgaagaacaatgtccaaatctatattgtttaatatattatatagatgtagcgtagctcctacaggaatatctttaactaagtcaatgatttcatcaaccgttagatctattttaaagttaatcatataggcattgatttttaaaaggtatgtagccttgactacattctcattaattaaccattccaagtcattgtgtgtaagaagattatattctatcataagcttgactacatttggtcccgataccattaaagaattcttatgatataaggaaacagattttaggtactcatctactctacaagaattttggagagccttaacgatatcagtgacgtttattatttcaggaggaaagaatctaacattgagaatatcggaattaatagcttccagatacagtgattttggcaatagtccgtgtaatccataatccagtaacacgagctggtgcttgctagacaccttttcaatgtttaatttttttgaaataagctttgataaagccttcctcgcaaattccggatacatgaacatgtcggcgacatgattaagtattgttttttcattatttttatattttctcaacaagttctcaataccccaatagatgatagaatatcacccaatgcgtccatgttgtctatttccaacaggtcgctatatccaccaatagaagtttttccaaaaaagattctaggaacagttctaccaccagtaatttgttcaaaataatcccgcaattcattttcgggtttaaattctttaatatcgacaatttcatacgctcctcttttgaaactaaacttatttagaatatccagtgcatttctacaaaaaggacatgtatacttgacaaaaattgtcactttgttattggccaacctttgttgtacaaattcctcggccattttaatatttaagtgatataaaactatctcgacttatttaactctttagtcgagatatatggacgcagatagctatatgatagccaactacagaaggcaaacgctataaaaaacataattacgacgagcatatttataaatatttttattcagcattacttgatatagtaatattaggcacagtcaaacattcaaccactctcgatacattaactctctcattttctttaacaaattctgcaatatcttcgtaaaaagattcttgaaactttttagaatatctatcgactctagatgaaatagcgttcgtcaacatactatgttttgtatacataaaggcgcccattttaacagtttctagtgacaaaatgctagcgatcctaggatcctttagaatcacatagattgacgattcgtctctcttagtaactctagtaaaataatcatacaatctagtacgcgaaataatattatccttgacttgaggagatctaaacaatctagttttgagaacatcgataagttcatcgggaatgacatacatactatctttaatagaactcttttcatccagttgaatggattcgtccttaaccaactgattaatgagatcttctattttatcattttccagatgatatgtatgtccattaaagttaaattgtgtagcgcttctttttagtctagcagccaatactttaacatcactaatatcgatatacaaaggagatgatttatctatggcattaagaattcgtttttcgacatccgtcaaaaccaattcctttttgcctgtatcatccagttttccatcctttgtaaagaaattattttctactagactattaataagactgataaggattcctccataattgcacaatccaaactttttaacaaaactagactttacgagatctacaggaatgcgtacttcaggttttttagcttgtgattttttcttttgcggacattttctagtaaccaactcatctaccatttcattgattttagcagtgaaataagctttcaatgcacgggcactgatactattgaaaacgagttgatcttcaaattccgccatttaagttcaccaaacaacttttaaatacaaatatatcaatagtagtagaataagaactataaaaaaaataataattaaccaaccccaacaaccggtattattagttgatgtggtagttttctcatcacttagaacagatttaacaatttctataaagtctgtcaaatcatcttccggagaccccataaatacaccaaatatagcggcgtacaacttatccatttatacattgaatattggcttttctttatcgctatcttcatcatattcatcatcaatatcaacaagtcccagattacgagccagatcttcttctacattttcagtcattgatacacgttcactatctccagagagtccgataacgttagccaccacttctctatcaatgattagtttcttgagcgcgaaagtaatttttgtttccgttccggatctatagaagacgataggtgtgataattgccttggccaattgtctttctcttttactgagtgattctagttcaccttctatagatctgagaatggatgattctccagtcgaaacatattctaccatggatccgtttaatttgttgatgaagatggattcatccttaaatgttttctctgtaatagtttccaccgaaagactatgcaaagaatttggaatgcgttccttgtgcttaatgtttccatagacggcttctagaagttgatacaacataggactagccgcggtaacttttatttttagaaagtatccatcgcttctatcttgtttagatttatttttataaagtttagtctctccttccaacataataaaagtggaagtcatttgactagataaactatcagtaagttttatagagatagacgaacaattagcgtattgagaagcatttagtgtaacgtattcgatacattttgcattagatttactaatcgattttgcatactctataacacccgcacaagtctgtagagaatcgctagatgcagtaggtcttggtgaagtttcaactctcttcttgattaccttactcatgattaaacctaaataattgtactttgtaatataatgatatatattttcactttatctcatttgagaataaaaatgtttttgtttaaccactgcatgatgtacagatttcggaatcgcaaaccaccagtggttttattttatccttgtccaatgtgaattgaatgggagcggatgcgggtttcgtacgtagatagtacattcccgtttttagaccgagactccatccgtaaaaatgcatactcgttagtttggaataactcggatctgctatatggatattcatagattgactttgatcgatgaaggctcccctgtctgcagccatttttatgatcgtcttttgtggaatttcccaaatagttttataaactcgcttaatatcttctggaaggtttgtattctgaatggatccaccatctgccataatcctattcttgatctcatcattccataattttctctcggttaaaactctaaggagatgcggattaactacttgaaattctccagacaatactctccgagtgtaaatattactggtatacggttccaccgactcattatttcccaaaatttgagcagttgatgcagtcggcataggtgccaccaataaactatttctaagaccgtatgttctgattttatcttttagaggttcccaattccaaagatccgacggtacaacattccaaagatcatattgtagaataccgttactggcgtacgatcctacatatgtatcgtatggtccttccttctcagctagttcacaactcgcctctaatgcaccgtaataaatggtttcgaagatcttcttatttagatcttgtgcttccaggctatcaaatggataatttaagagaataaacgcgtccgctaatccttgaacaccaataccgataggtctatgtctcttattagagatttcagcttctggaataggataataattaatatctataattttattgagatttctgacaattactttgaccacatccttcagtttgagaaaatcaaatcgcccatctattacaaacatgttcaaggcaacagatgccagattacaaacggctacctcattagcatccgcatattgtattatctcagtgcaaagattactacacttgatagttcctaaattttgttgattactctttttgttacacgcatccttataaagaatgaatggagtaccagtttcaatctgagattctataatcgctttccagacgactcgagcctttattatagatttgtatctcctttctctttcgtatagtgtatacaatcgttcgaactcgtctccccaaacattgtccaatccaggacattcatccggacacatcaacgaccactctccgtcatccttcactcgtttcataaagagatcaggaatccaaagagctataaatagatctctggttctatgttcctcgtttcctgtattctttttaagatcgaggaacgccataatatcagaatgccacggttccaagtatatggccataactccaggccgtttgtttcctccctgatctatgtatctagcggtgttattataaactctcaacattggaataataccgtttgatataccattggtaccggagatatagcttccactggcacgaatattactaattgatagacctattccccctgccattttagagattaatgcgcatcgttttaacgtgtcatagataccctctatgctatcatcgatcatgttaagtagaaaacagctagacatttggtgacgactagttcccgcattaaataaggtaggagaagcgtgcgtaaaccatttttcagaaagtagattgtacgtctcaatagctgagtctatatcccattgatgaattcctactgcgacacgcattaacatgtgctgaggtctttcaacgatcttgttgtttattttcaacaagtaggatttttccaaagttttaaaaccaaaatagttgtatgaaaagtctcgttcgtaaataataaccgagttgagtttatccttatatttgttaactatatccatggtgatacttgaaataatcggagaatgtttcccatttttaggattaacatagttgaataaatcctccatcacttcactaaatagtttttttgtttccttgtgtagatttgatacggctattctggcggctagaatggcataatccggatgttgtgtagtacaagtggctgctatttcggctgccagagtgtccaattctaccgttgttactccattatatattccttgaataaccttcatagctattttaataggatctatatgatccgtgtttaagccataacataattttctaatacgagacgtgattttatcaaacatgacattttccttgtatccatttcgtttaatgacaaacatttttgttggtgtaataaaaaaattatttaacttttcattaatagggatttgacgtatgtagcgtacaaaatgattgttcctggtatatagataaagagtcctatatatttgaaaatcgttacggctcgattaaactttaatgattgcatagtgaatatatcattaggatttaactccttgactatcatggcggcgccagaaattaccatcaaaagcattaatacagttataccgatcgcagttagaacggttatagcatccaccatttatatctaaaaattagatcaaagaatatgtgacaaagtcctagttgtatactgagaattgacgaaacaatgtttcttacatatttttttcttattagtaaccgacttaatagtaggaactggaaaactagacttgattattctataagtatagatacccttccaaataatattctctttgataaaagttccagaaaatgtagaattttttaaaaagttatcttttgctattaccaagattgtgtttagacgcttattattaatatgagtgatgaaatccacaccgcctctagatatcgcctttatttccacattagatggtaaatccaatagtgaaactatctttttaggaatgtatggactcgcgtttagaggagtaaacgtcttaggcgtcggaaaggatgattcatcaaacgaataaacaatttcacaaatggatgttaatgtattagtaggaaattttttgacgctattggaattgaagattctaatggatgatgttctacctatttcatccgataacatgttaatttccgacaccaacggttttaatatttcgatgatatacggtagtctctctttcggacttatatagcttattccacaatacgagtcattatatactccaaaaaacaaaataactagtataaaatctgtatcgaatgggaaaaacgaaattatcgacataggtatagaatccggaacattgaacgtattaatacttaattctttttctgtggtaagtaccgataggttattgacattgtatggttttaaatattctataacttgagacttgatagatattagtgatgaattgaaaattatttttatcaccacgtgtgtttcaggatcatcgtcgacgcccgtcaaccaaccgaacggagtaaaataaatatcattaatatatgctctagatattagtatttttatcaatcctttgattatcatcttctcgtaggcgaatgattccatgatcaagagtgatttaagaacatcctccggagtattaatgggcttagtaaacagtccatcgttgcaataataaaagttatccaagttaaaggatattatgcattcgtttaaagatatcacctcatctgacggagacaattttttggtaggttttagagactttgaagctacttgtttaacaaagttattcatcgtcgtctactattctatttaattttgtagttaatttatcacatatcacattaattgactttttggtccacttttccatacgtttatattcttttaatcctgcgttatccgtttccgttatatccagggatagatcttgcaagttaaatagaatgctcttaaataatgtcattttcttatccgctaaaaatttaaagaatgtataaacctttttcagagatttgaaactcttaggtggtgtcctagtacacaatatcataaacaaactaataaacattccacattcagattccaacagctgattaacttccacattaatacagcctattttcgctccaaatgtacattcgaaaaatctgaataaaacatcgatgtcacaatttgtattatccaatacagaatgtttgtgattcgtgttaaaaccatcggagaaggaatagaaataaaaattattatagtggtggaattcagttggaatattgcctccggagtcataaaaggatactaaacattgttttttatcataaattacacatttccaatgagacaaataacaaaatccaaacattacaaatctagaggtagaacttttaattttgtctttaagtatatacgataagatatgtttattcataaacgcgtcaaatttttcatgaatcgctaaggagtttaagaatctcatgtcaaattgtcctatataatccacttcggatccataagcaaactgagagactaagttcttaatacttcgattgctcatccaggctcctctctcaggctctattttcatcttgacgacctttggattttcaccagtatgtattcctttacgtgataaatcatcgattttcaaatccatttgtgagaagtctatcgccttagatactttttcccgtagtcgaggtttaaaaaaatacgctaacggtatactagtaggtaactcaaagacatcatatatagaatggtaacgcgtctttaactcgtcggttaactctttcttttgatcgagttcgtcgctactattgggtctgctcaggtgccccgactctactagttccaacatcataccgataggaatacaagacactttgccggcggttgtagatttatcatatttttccactacatatccgttacaatttgttaaaaatttagatacatctatattgctacataatccagctagtgaatatatatgacataataaattggtaaatcctagttctggtattttactaattactaaatctgtatatctttccatttatcatggaaaagaatttaccagatatcttcttttttccaaactgcgttaatgtattctcttacaaatattcacaagatgaattcagtaatatgagtaaaacggaacgtgatagtttctcattggccgtgtttccagttataaaacatagatggcataacgcacacgttgtaaaacataaaggaatatacaaagttagtacagaagcacgtggaaaaaaagtatctcctccatcactaggaaaacccgcacacataaacctaaccgcgaagcaatatatatacagtgaacacacaataagctttgaatgttatagttttctaaaatgtataacaaatacagaaatcaattcgttcgatgagtatatattaagaggactattagaagctggtaatagtttacagatattttccaattccgtaggtaaacgaacagatactataggtgtactagggaataagtatccatttagcaaaattccattggcctcattaactcctaaagcacaacgagagatattttcagcgtggatttctcatagacctgtagttttaactggaggaactggagtgggtaagacgtcacaggtacccaagttattgctttggtttaattatttatttggtggattctctactctagataaaatcactgactttcacgaaagaccagtcattctatctcttcctaggatagctttagttagattgcatagcaataccattttaaaatcattgggatttaaggtactagatggatctcctatttctttacggtacggatctataccggaagaattaataaacaaacaaccaaaaaaatatggaattgtattttctacccataagttatctctaacaaaactatttagttatggcactcttattatagacgaagttcatgagcatgatcaaataggagatattattatagcagtagcgagaaagcatcatacgaaaatagattctatgtttttaatgactgccacgttagaggatgacagggaacggctaaaagtatttttacctaatcccgcatttatacatattcctggagatacactgtttaaaattagcgaggtatttattcataataagataaatccatcttccagaatggcatacatagaagaagaaaagagaaatttagttactgctatacagatgtatactcctcctgatggatcatccggtatagtctttgtggcatccgttgcacagtgtcacgaatataaatcatatttagaaaaaagattaccgtatgatatgtatattattcatggtaaggtcttagatatagacgaaatattagaaaaagtgtattcatcacctaatgtatcgataattatttctactccttatttggaatccagcgttactatacgcaatgttacacacatttatgatatgggtagagtttttgtccccgctccttttggaggatcgcaacaatttatttctaaatctatgagagatcaacgaaaaggaagagtaggaagagttaatcctggtacatacgtctatttctatgatctgtcttatatgaagtctatacagcgaatagattcagaatttctacataattatatattgtacgctaataagtttaatctaacactccccgaagatttgtttataatccctacaaatttggatattctatggcgtacaaaggaatatatagactcgttcgatattagtacagaaacatggaataaattattatccaattattatatgaagatgatagagtatgctaaactttatgtactaagtcctattctcgctgaggagttggataactttgagaggacgggagaattaactagtattgtacgagaagccattttatctctaaatttacaaattaagattttaaattttaaacataaagatgatgatacgtatatacacttttgtaaaatattattcggtgtctataacggaacaaacgctactatatattatcatagacctctaacgggatatatgaatatgatttcagatactatatttgttcctgtagataataactaaaaatcaaactctaatgaccacatctttttttagagatgaaaaattttccacatctccttttgtagacacgactaaacattttgcagaaaaaagtttattagtgtttagataatcgtatacttcatcagtgtagatagtaaatgtgaacagataaaaggtattcttgctcaatagattggtaaattccatagaatatattaatcctttcttcttgagatcccacatcatttcaaccagagacgttttatccaatgatttacctcgtactataccacatacaaaactagattttgcagtgacgtcgtacctggtattcctaccaaacaaaattttacttttagttcttttagaaaattctaaggtagaatctctatttgccaatatgtcatctatggaattaccactagcaaaaaatgatagaaatatatattgatacatcgcagctggttttgatctactatactttaaaaacgaatcagattccataattgcctgtatatcatcagctgaaaaactatgttttacacgtattccttcggcatttctttttaatgatatatcttgtttagacaatgataaagttatcatgtccatgagagacgcgtctccgtatcgtataaatatttcattagatgttagacgcttcattaggggtatacttctataaggtttcttaatcagtccatcattggttgcgtcaagaactactatcggatgttgttgggtatctctagtgttacacatggccttactaaagtttgggtaaataactatgatatctctattaattatagatgcatatatttcattcgtcaaggatattagtatcgacttgctatcgtcattaatacgtgtaatgtaatcatataaatcatgcgatagccaaggaaaatttaaatagatgttcatcatataatcgtcgctataattcatattaatacgttgacattgactaatttgtaatatagcctcgccacgaagaaagctctcgtattcagtttcatcgataaaggataccgttaaatataactggttgccgatagtctcatagtctattaagtggtaagtttcgtacaaatacagaatccctaaaatattatctaatgttggattaatctttaccataactgtataaaatggagacggagtcataactattttaccgtttgtacttactggaatagatgaaggaataatctccggacatgctggtaaagacccaaatgtctgtttgaagaaatccaatgttccaggtcctaatctcttaacaaaaattacgatattcgatcccgatatcctttgcattctatttaccagcatatcacgaactatattaagattatctatcatgtctattctcccaccgttatataaatcgcctccgctaagaaacgttagtatatccatacaatggaatacttcatttctaaaatagtattcgttttctaattctttaatgtgaaatcgtatactagaaagggaaaaattatctttgagttttccgttagaaaagaaccacgaaactaatgttctgattgcgtccgattccgttgctgaattaatggatttacaccaaaaactcatataacttctagatgtagaagcattcgctaaaaaattagtagaatcaaaggatataagtagatgttccaacaagtgagcaattcccaagatttcatctatatcattctcgaatccgaaattagaaattcccaagtagatatcctttttcatccgatcgttgatgaaaatacgaactttattcggtaagacaatcatttactaaggagtaaaataggaagtaatgttcgtatgtcgttatcatcgtataaattaaaggtgtgttttttaccattaagtgacattataattttaccaatattggaattataatataggtgtatttgcgcactcgcgacggttgatgcatcggtaaatatagctgtatctaatgttctagtcggtatttcatcatttcgctgtctaataatagcgttttctctatctgtttccattacagctgcctgaagtttattggtcggataatatgtaaaataataagaaatacatacgaataacaaaaataaaataagatataataaagatgccatttagagatctaattttgtttaacttgtccaaattcctacttacagaagatgaggaatcgttggagatagtgtcttccttatgtagaggatttgaaatatcttataatgacttgataacttactttccagataggaaataccataaatatatttataaagtatttgaacatgtagatttatcggaggaattaagtatggaattccatgatacaactctgagagatttagtctatcttagattgtacaagtattccaagtgtatacggccgtgttataaattaggagataatctaaaaggcatagttgttataaaggacaggaatatttatattagggaagcaaatgatgacttgatagaatatctcctcaaggaatacactcctcagatttatacatattctaatgagcgcgtccccataactggttcaaaattaattctttgtggattttctcaagttacatttatggcgtatacaacgtcgcatataacaacaaataaaaaggtagatgttctcgtttccaaaaaatgtatagatgaactagtcgatccaataaattatcaaatacttcaaaatttatttgataaaggaagcggaacaataaacaaaatactcaggaagatattttattcggtaacaggtggccaaactccataggtagctttttctatttcggattttagaatttccaaattcaccagcgatttatcggttttggtgaaatccaaggatttattaatgtccacaaatgccatttgttttgtctgtggattgtatttgaaaatggaaacgatgtagttagatagatgcgctgcgaagtttcctattagggttccgcgcttcacgtcacccagcatacttgaatcaccatcctttaaaaaaaatgataagatatcaacatggagtatatcatactcgaattttaattcttctactgactcactgacattttcacaaatactacaatacggtttaccgaaaataatcagtacgttcttcatttatgggtatcaaaaacttaaaatcgttactgctggaaaataaatcactgacgatattagatgataatttatacaaagtatacaatggaatatttgtggatacaatgagtatttatatagccgtcgccaattgtgtcagaaacttagaagagttaactacggtattcataaaatacgtaaacggatgggtaaaaaagggagggcatgtaaccctttttatcgatagaggaagtataaaaattaaacaagacgttagagacaagagacgtaaatattctaaattaaccaaggacagaaaaatgttagaattagaaaagtgtacatccgaaatacaaaatgttaccggatttatggaagaagaaataaaggcagaaatgcaattaaaaatcgataaactcacatttcaaatatatttatctgattctgataacataaaaatatcattgaatgagatactaacacatttcaacaataatgagaatgttacattattttattgtgatgaacgagacgcagaattcgttatgtgtctcgaggctaaaacacatttctctaccacaggagaatggccgttgataataagtaccgatcaggatactatgctatttgcatctgctgataatcatcctaagatgataaaaaacttaactcaactgtttaaatttgttccctcggcagaggataactatttagcaaaattaacggcgttagtgaatggatgtgatttctttcctggactctatggggcatctataacacccaccaacttaaacaaaatacaattgtttagtgattttacaatcgataatatagtcactagtttggcaattaaaaattattatagaaagactaactctaccgtagacgtgcgtaatattgttacgtttataaacgattacgctaatttagacgatgtctactcgtatattcctccttgtcaatgcactgttcaagaatttatattttccgcattagatgaaaaatggaatgaatttaaatcatcttatttagaaagcgtgccgttaccctgccaattaatgtacgcgttagaaccacgcaaggagattgatgtttcagaagttaaaactttatcatcttatatagatttcgaaaatactaaatcagatatcgatgttataaaatctatatcctcgatcttcggatattctaacgaaaactgtaacacgatagtattcggcatctataaggataatttactactgagtataaataattcattttactttaacgatagtctgttaataaccaatactaaaagtgataatataataaatataggttactagattaaaaatggtgttccaactcgtgtgctctacatgcggtaaagatatttctcacgaacgatataaattgattatacgaaaaaaatcattaaaggatgtactcgtcagtgtaaagaacgaatgttgtaggttaaaattatctacacaaatagaacctcaacgtaacttaacagtgcaacctctattggatataaactaatatggatccggttaattttatcaagacatatgcgcctagaggttctattatttttattaattataccatgtcattaacaagtcatttgaatccatcgatagaaaaacatgtgggtatttattatggtacgttattatcggaacacttggtagttgaatctacctatagaaaaggagttcgaatagtcccattggatagtttttttgaaggatatcttagtgcaaaagtatacatgttagagaatattcaagttatgaaaatagcagctgatacgtcattaactttattgggtattccgtatggatttggtcatgatagaatgtattgttttaaattggtagctgactgttataaaaatgccggtattgatacatcgtctaaacgaatattgggcaaagatatttttctgagccaaaacttcacagacgataatagatggataaagatatatgattctaataatttaacattttggcaaattgattaccttaaagggtgagttaatatgcataactactcctccgttgttttttccctcgttctttttcttaacgttgtttgccatcactctcataatgtaaagatattctaaaatggtaaacttttgcatatcggacgcagaaattggtataaatgttgtaattgtattatttcccgtcaatggactagtcacagctccatcagttttatatcctttagagtatttctcactcgtgtctaacattctagagcattccatgatctgtttatcgttgatattggccggaaagatagattttttattttttattatattactattggcaattgtagatataacttctggtaaatatttttctaccttttcaatctcttctattttcaagccggctatatattctgctatattgttgctagtatcaataccttttctggctaagaagtcatatgtggtattcactatatcagttttaactggtagttccattagcctttccacttctgcagaataatcagaaattggttctttaccagaaaatccagctactataataggctcaccgatgatcattggcaaaatcctatattgtaccagattaatgagagcatatttcatttccaataattctgctagttcttgagacattgatttatttgatgaatctagttggttctctagatactctaccatttctgccgcatacaataacttgttagataaaatcagggttatcaaagtgtttagcgtggctagaatagtgggcttgcatgtattaaagaatgcggtagtatgagtaaaccgttttaacgaattatatagtctccagaaatctgtggcgttacatacatgagccgaatgacatcgaagattgtccaatatttttaatagctgctctttgtccattatttctatatttgactcgcaacaattgtagataccattaatcaccgattcctttttcgatgccggacaatagcacaattgtttagctttggactctatgtattcagaattaatagatatatctctcaatacagattgcactatacattttgaaactatgtcaaaaattgtagaacgacgctgttctgcagccatttaactttaaataatttacaaaaatttaaaatgagcatccgtataaaaatcgataaactgcgccaaattgtggcatatttttcagagttcagtgaagaagtgtctataaatgtagactcgacggatgagttaatgtatatttttgccgccttgggcggatctgtaaacatttgggcaattatacctctaagtgcatcagtgttttaccgaggagccgaaaatattgtgtttaatcttcctgtgtccaaggtaaaatcgtgtttgtgtagttttcacaatgatgccatcatagatatagaacctgatctggaaaataatctagtaaaactttctagttatcatgtagtaagtgtcgattgtaacaaggaactgatgcctattaggacagatactactatttgtctaagtatagatcaaaagaaatcttacgtgtttaattttcacaagtatgaagaaaaatgttgtggtagaaccgtcattcatctagaatggttgttgggctttatcaagtgtattagtcagcatcagcatctggctattatgtttaaagatgacaatattattatgaagactcctggtaatactgatgcgttttccagggaatattctatgactgaatgttctcaagaactacaaaagttttctttcaaaatagctatctcgtctctcaacaaactacgaggattcaaaaagagagtcaatgtttttgaaactagaatcgtaatggataatgacgataacattttaggaatgttgttttcggatagagttcaatcctttaagatcaacatctttatggcgtttttagattaatactttcaatgagataaatatgggtggcggagtaagtgttgagctccctaaacgggatccgcctccgggagtacccactgatgagatgttattaaacgtggataaaatgcatgacgtgatagctcccgctaagcttttagaatatgtgcatataggaccactagcaaaagataaagaggataaagtaaagaaaagatatccagagtttagattagtcaacacaggacccggtggtctttcggcattgttaagacaatcgtataatggaaccgcacccaattgctgtcgcacttttaatcgtactcattattggaagaaggatggaaagatatcagataagtatgaagagggtgcagtattagaatcgtgttggccagacgttcacgacactggaaaatgcgatgttgatttattcgactggtgtcagggggatacgttcgatagaaacatatgccatcagtggatcggttcagcctttaataggagtaatagaactgtagagggtcaacaatcgttaataaatctgtataataagatgcaaacattatgtagtaaagatgctagtgtaccaatatgcgaatcatttttgcattatttacgcgcacacaatacagaagatagcaaagagatgatcgattatattctaagacaacagtctgcggactttaaacagaaatatatgagatgtagttatcccactagagataagttagaagagtcattaaaatatgcggaacctcgagaatgttgggatccagagtgttcgaatgccaatgttaatttcttactaacacgtaattataataatttaggactttgcaatattgtacgatgtaataccagcgtgaacaacttacagatggataaaacttcctcattaagattgtcatgtggattaagcaatagtgatagattttctactgttcccgtcaatagagcaaaagtagttcaacataatattaaacactcgttcgacctaaaattgcatttgatcagtttattatctctcttggtaatatggatactaattgtagctatttaaatgggtgccgcggcaagcatacagacgacggtgaatacactcagcgaacgtatctcgtctaaattagaacaagaagcgaacgctagtgctcaaacaaaatgtgatatagaaatcggaaatttttatatccgacaaaaccatggatgtaacctcactgttaaaaatatgtgctctgcggacgcggatgctcagttggatgctgtgttatcagccgctacagaaacatatagtggattaacaccggaacaaaaagcatacgtgccagctatgtttactgctgcgttaaacattcagacgagtgtaaacactgttgttagagattttgaaaattatgtgaaacagacttgtaattctagcgcggtcgtcgataacaaattaaagatacaaaacgtaatcatagatgaatgttacggagccccaggatctccaacaaatttggaatttattaatacaggatctagcaaaggaaattgtgccattaaagcgttgatgcaattgacgactaaggccactactcaaatagcacctagacaagttgctggtacaggagttcagttttatatgattgttatcggtgttataatattggcagcgttgtttatgtactatgccaagcgtatgttgttcacatccaccaatgataaaatcaaacttattttagccaataaggaaaacgtccattggactacttacatggacacattctttagaacttctccgatggttattgctaccacggatatgcaaaactgaaaatatattgataatattttaatagattaacatggaagttatcgctgatcgtctagacgatatagtgaaacaaaatatagcggatgaaaaatttgtagattttgttatacacggtctagagcatcaatgtcctgctatacttcgaccattaattaggttgtttattgatatactattatttgttatagtaatttatatttttacggtacgtctagtaagtagaaattatcaaatgttgttggtggtgctagtcatcacattaactattttttattactttatactataatagtactagactgacttctaacaaacatctcacctgccataaataaatgcttgatattaaagtcttctatttctaacactattccatctgtggaaaataatactctgacattatcgctaattgacacatcggtgagtgatatgcctataaagtaataatcttctttgggcacatataccagtgtaccaggttctaacaacctatttactggtgctcctgtagcatactttttctttaccttgagaatatccatcgtttgcttggtcaatagcgatatgtgattttttatcaaccactcaaaaaagtaattggagtgttcatatcctctacgggctattgtctcatggccgtgtatgaaatttaagtaacacgactgtggtagatttgttctatagagccgattgccgcaaatagatagaactaccaatatgtctgtacaaatgttaaacattaattgattaacagaaaaaacaatgttcgttctgggaatagaaaccagatcaaaacaaaattcgttagaatatatgccacgtttatacatggaatataaaataactacagtttgaaaaataacagtatcatttaaacatttaacttgcggggttaatctcacaactttactgtttttgaactgttcaaaatatagcatcgatccgtgagaaatacgtttagccgcctttaatagaggaaatcccaccgcctttctggatctcaccaacgacgatagttctgaccagcaactcatttcttcatcatccacctgttttaacatataataggcaggagatagatatccgtcattgcaatattccttctcgtaggcacacaatctaatattgataaaatctccattctcttctctgcatttattatcttgtctcggtggctgattaggctgtggtcttggtttaggccttggtctatcgttgttgaatctattttggtcattaaatctttcatttcttcctggtatatttctatcacctcgtttggttggatttttgtctatattatcgtttgtaacatcggtacgggtattcatttatcacaaaaaaaacttctctaaatgagtctactgctagaaaacctcatcgaagaagataccatattttttgcaggaagtatatctgagtatgatgatttacaaatggttattgccggcgcaaaatccaaatttccaagatctatgctttctatttttaatatagtacctagaacgatgtcaaaatatgagttggagttgattcataacgaaaatatcacaggagcaatgtttaccacaatgtataatataagaaacaatttgggtctaggagatgataaactaactattgaagccattgaaaactatttcttggatcctaacaatgaagttatgcctcttattattaataatacggatatgactgccgtcattcctaaaaaaagtggtaggagaaagaataagaacatggttatcttccgtcaaggatcatcacctatcttgtgcattttcgaaactcgtaaaaagattaatatttataaagaaaatatggaatccgcgtcgactgagtatacacctatcggagacaacaaggctttgatatctaaatatgcgggaattaatgtcctgaatgtgtattctccttccacatccataagattgaatgccatttacggattcaccaataaaaataaactagagaaacttagtactaataaggaactagaatcgtatagttctagccctcttcaagaacccattaggttaaatgattttctgggactattggaatgtgttaaaaagaatattcctctaacagatattccgacaaaggattgattactataaatggagaatgttcctaatgtatactttaatcctgtgtttatagagcccacgtttaaacattctttattaagtgtttataaacacagattaatagttttatttgaagtattcgttgtattcattctaatatatgtattttttagatctgaattaaatatgttcttcatgcctaaacgaaaaatacccgatcctattgatagattacgacgtgctaatctagcgtgtgaagacgataaattaatgatctatggattaccatggatgacaactcaaacatctgcgttatcaataaatagtaaaccgatagtgtataaagattgtgcaaagcttttgcgatcaataaatggatcacaaccagtatctcttaacgatgttcttcgcagatgatgattcattttttaagtatttggctagtcaagatgatgaatcttcattatctgatatattgcaaatcactcaatatctagactttctgttattattattgatccaatcaaaaaataaattagaagctgtgggtcattgttatgaatctctttcagaggaatacagacaattgacaaaattcacagactttcaagattttaaaaaactgtttaacaaggtccctattgttacagatggaagggtcaaacttaataaaggatatttgttcgactttgtgattagtttgatgcgattcaaaaaagaatcctctctagctaccaccgcaatagatcctgttagatacatagatcctcgtcgcaatatcgcattttctaacgtgatggatatattaaagtcgaataaagtgaacaataattaattctttattgtcatcatgaacggcggacatattcagttgataatcggccccatgttttcaggtaaaagtacagaattaattagacgagttagacgttatcaaatagctcaatataaatgcgtgactataaaatattctaacgataatagatacggaacgggactatggacgcatgataagaataattttgaagcattggaagcaactaaactatgtgatgtcttggaatcaattacagatttctccgtgataggtatcgatgaaggacagttctttccagacattgttgaattagatcgataaaaattaattaattacccgggtaccaggcctagatctgtcgagatccggtggtggtgcaaatcaaagaactgctcctcagtggatgttgcctttacttctaggcctgtacggaagtgttacttctgctctaaaagctgctgcagggggggggggggggtgggggggccggttagggccgccatcccctcagagcgtcgggatatcgggtggcggctcgggacggaggacgcgctagtgttcttctgtgtggcagttcagaatgatggatcaagctagatcagcattctctaacttgtttggtggagaaccattgtcatatacccggttcagcctggctcggcaagtagatggcgataacagtcatgtggagatgaaacttgctgtagatgaagaagaaaatgctgacaataacacaaaggccaatgtcacaaaaccaaaaaggtgtagtggaagtatctgctatgggactattgctgtgatcgtctttttcttgattggatttatgattggctacttgggctattgtaaaggggtagaaccaaaaactgagtgtgagagactggcaggaaccgagtctccagtgagggaggagccaggagaggacttccctgcagcacgtcgcttatattgggatgacctgaagagaaagttgtcggagaaactggacagcacagacttcaccagcaccatcaagctgctgaatgaaaattcatatgtccctcgtgaggctggatctcaaaaagatgaaaatcttgcgttgtatgttgaaaatcaatttcgtgaatttaaactcagcaaagtctggcgtgatcaacattttgttaagattcaggtcaaagacagcgctcaaaactcggtgatcatagttgataagaacggtagacttgtttacctggtggagaatcctgggggttatgtggcgtatagtaaggctgcaacagttactggtaaactggtccatgctaattttggtactaaaaaagattttgaggatttatacactcctgtgaatggatctatagtgattgtcagagcagggaaaatcacctttgcagaaaaggttgcaaatgctgaaagcttaaatgcaattggtgtgttgatatacatggaccagactaaatttcccattgttaacgcagaactttcattctttggacatgctcatctggggacaggtgacccttacacacctggattcccttccttcaatcacactcagtttccaccatctcggtcatcaggattgcctaatatacctgtccagacaatctccagagctgctgcagaaaagctgtttgggaatatggaaggagactgtccctctgactggaaaacagactctacatgtaggatggtaacctcagaaagcaagaatgtgaagctcactgtgagcaatgtgctgaaagagataaaaattcttaacatctttggagttattaaaggctttgtagaaccagatcactatgttgtagttggggcccagagagatgcatggggccctggagctgcaaaatccggtgtaggcacagctctcctattgaaacttgcccagatgttctcagatatggtcttaaaagatgggtttcagcccagcagaagcattatctttgccagttggagtgctggagactttggatcggttggtgccactgaatggctagagggatacctttcgtccctgcatttaaaggctttcacttatattaatctggataaagcggttcttggtaccagcaacttcaaggtttctgccagcccactgttgtatacgcttattgagaaaacaatgcaaaatgtgaagcatccggttactgggcaatttctatatcaggacagcaactgggccagcaaagttgagaaactcactttagacaatgctgctttccctttccttgcatattctggaatcccagcagtttctttctgtttttgcgaggacacagattatccttatttgggtaccaccatggacacctataaggaactgattgagaggattcctgagttgaacaaagtggcacgagcagctgcagaggtcgctggtcagttcgtgattaaactaacccatgatgttgaattgaacctggactatgagaggtacaacagccaactgctttcatttgtgagggatctgaaccaatacagagcagacataaaggaaatgggcctgagtttacagtggctgtattctgctcgtggagacttcttccgtgctacttccagactaacaacagatttcgggaatgctgagaaaacagacagatttgtcatgaagaaactcaatgatcgtgtcatgagagtggagtatcacttcctctctccctacgtatctccaaaagagtctcctttccgacatgtcttctggggctccggctctcacacgctgccagctttactggagaacttgaaactgcgtaaacaaaataacggtgcttttaatgaaacgctgttcagaaaccagttggctctagctacttggactattcagggagctgcaaatgccctctctggtgacgtttgggacattgacaatgagttttaaatgtgatacccatagcttccatgagaacagcagggtagtctggtttctagacttgtgctgatcgtgctaaattttcagtagggctacaaaacctgatgttaaaattccatcccatcatcttggtactactagatgtctttaggcagcagcttttaatacagggtagataacctgtacttcaagttaaagtgaataaccacttaaaaaatgtccatgatggaatattcccctatctctagaattttaagtgctttgtaatgggaactgcctctttcctgttgttgttaatgaaaatgtcagaaaccagttatgtgaatgatctctctgaatcctaagggctggtctctgctgaaggttgtaagtggtcgcttactttgagtgatcctccaacttcatttgatgctaaataggagataccaggttgaaagaccttctccaaatgagatctaagcctttccataaggaatgtagctggtttcctcattcctgaaagaaacagttaactttcagaagagatgggcttgttttcttgccaatgaggtctgaaatggaggtccttctgctggataaaatgaggttcaactgttgattgcaggaataaggccttaatatgttaacctcagtgtcatttatgaaaagaggggaccagaagccaaagacttagtatattttcttttcctctgtcccttcccccataagcctccatttagttctttgttatttttgtttcttccaaagcacattgaaagagaaccagtttcaggtgtttagttgcagactcagtttgtcagactttaaagaataatatgctgccaaattttggccaaagtgttaatcttaggggagagctttctgtccttttggcactgagatatttattgtttatttatcagtgacagagttcactataaatggtgtttttttaatagaatataattatcggaagcagtgccttccataattatgacagttatactgtcggttttttttaaataaaagcagcatctgctaataaaacccaacagatactggaagttttgcatttatggtcaacacttaagggttttagaaaacagccgtcagccaaatgtaattgaataaagttgaagctaagatttagagatgaattaaatttaattaggggttgctaagaagcgagcactgaccagataagaatgctggttttcctaaatgcagtgaattgtgaccaagttataaatcaatgtcacttaaaggctgtggtagtactcctgcaaaattttatagctcagtttatccaaggtgtaactctaattcccattttgcaaaatttccagtacctttgtcacaatcctaacacattatcgggagcagtatcttccataatgtataaagaacaaggtagtttttacctaccacagtgtctgtatcggagacagtgatctccatatgttacactaagggtgtaagtaattatcgggaacagtgtttcccataattttcttcatgcaatgacatcttcaaagcttgaagatcgttagtatctaacatgtatcccaactcctataattccctatcttttagttttagttgcagaaacattttgtggtcattaagcattgggtgggtaaattcaaccactgtaaaatgaaattactacaaaatttgaaatttagcttgggtttttgttacctttatggtttctccaggtcctctacttaatgagatagtagcatacatttataatgtttgctattgacaagtcattttaactttatcacattatttgcatgttacctcctataaacttagtgcggacaagttttaatccagaattgaccttttgacttaaagcagagggactttgtatagaaggtttgggggctgtggggaaggagagtcccctgaaggtctgacacgtctgcctacccattcgtggtgatcaattaaatgtaggtatgaataagttcgaagctccgtgagtgaaccatcattataaacgtgatgatcagctgtttgtcatagggcagttggaaacggcctcctagggaaaagttcatagggtctcttcaggttcttagtgtcacttacctagatttacagcctcacttgaatgtgtcactactcacagtctctttaatcttcagttttatctttaatctcctcttttatcttggactgacatttagcgtagctaagtgaaaaggtcatagctgagattcctggttcgggtgttacgcacacgtacttaaatgaaagcatgtggcatgttcatcgtataacacaatatgaatacagggcatgcattttgcagcagtgagtctcttcagaaaacccttttctacagttagggttgagttacttcctatcaagccagtacgtgctaacaggctcaatattcctgaatgaaatatcagactagtgacaagctcctggtcttgagatgtcttctcgttaaggagatgggccttttggaggtaaaggataaaatgaatgagttctgtcatgattcactattctagaacttgcatgacctttactgtgttagctctttgaatgttcttgaaattttagactttctttgtaaacaaatgatatgtccttatcattgtataaaagctgttatgtgcaacagtgtggagattccttgtctgatttaataaaatacttaaacactgaaaaaaaaaaaaaaaaaaaaaaaaaaaaaaaaaaaaaaaaaaaaaaaaaaaaaaaaaaaaaaaaaaaaaaaaaaaaaaaaagtaccttctgaggcggaaagaaccagccggatctcgacttcgagcttatttatattccaaaaaaaaaaaataaaatttcaatttttaagctttcactaattccaaacccacccgctttttatagtaagtttttcacccataaataataaatacaataattaatttctcgtaaaagtagaaaatatattctaatttattgcacggtaaggaagtagatcataactcgagcatgggagatcccgtcgttttacaacgtcgtgactgggaaaaccctggcgttacccaacttaatcgccttgcagcacatccccctttcgccagctggcgtaatagcgaagaggcccgcaccgatcgcccttcccaacagttgcgcagcctgaatggcgaatggcgctttgcctggtttccggcaccagaagcggtgccggaaagctggctggagtgcgatcttcctgaggccgatactgtcgtcgtcccctcaaactggcagatgcacggttacgatgcgcccatctacaccaacgtgacctatcccattacggtcaatccgccgtttgttcccacggagaatccgacgggttgttactcgctcacatttaatgttgatgaaagctggctacaggaaggccagacgcgaattatttttgatggcgttaactcggcgtttcatctgtggtgcaacgggcgctgggtcggttacggccaggacagtcgtttgccgtctgaatttgacctgagcgcatttttacgcgccggagaaaaccgcctcgcggtgatggtgctgcgctggagtgacggcagttatctggaagatcaggatatgtggcggatgagcggcattttccgtgacgtctcgttgctgcataaaccgactacacaaatcagcgatttccatgttgccactcgctttaatgatgatttcagccgcgctgtactggaggctgaagttcagatgtgcggcgagttgcgtgactacctacgggtaacagtttctttatggcagggtgaaacgcaggtcgccagcggcaccgcgcctttcggcggtgaaattatcgatgagcgtggtggttatgccgatcgcgtcacactacgtctgaacgtcgaaaacccgaaactgtggagcgccgaaatcccgaatctctatcgtgcggtggttgaactgcacaccgccgacggcacgctgattgaagcagaagcctgcgatgtcggtttccgcgaggtgcggattgaaaatggtctgctgctgctgaacggcaagccgttgctgattcgaggcgttaaccgtcacgagcatcatcctctgcatggtcaggtcatggatgagcagacgatggtgcaggatatcctgctgatgaagcagaacaactttaacgccgtgcgctgttcgcattatccgaaccatccgctgtggtacacgctgtgcgaccgctacggcctgtatgtggtggatgaagccaatattgaaacccacggcatggtgccaatgaatcgtctgaccgatgatccgcgctggctaccggcgatgagcgaacgcgtaacgcgaatggtgcagcgcgatcgtaatcacccgagtgtgatcatctggtcgctggggaatgaatcaggccacggcgctaatcacgacgcgctgtatcgctggatcaaatctgtcgatccttcccgcccggtgcagtatgaaggcggcggagccgacaccacggccaccgatattatttgcccgatgtacgcgcgcgtggatgaagaccagcccttcccggctgtgccgaaatggtccatcaaaaaatggctttcgctacctggagagacgcgcccgctgatcctttgcgaatacgcccacgcgatgggtaacagtcttggcggtttcgctaaatactggcaggcgtttcgtcagtatccccgtttacagggcggcttcgtctgggactgggtggatcagtcgctgattaaatatgatgaaaacggcaacccgtggtcggcttacggcggtgattttggcgatacgccgaacgatcgccagttctgtatgaacggtctggtctttgccgaccgcacgccgcatccagcgctgacggaagcaaaacaccagcagcagtttttccagttccgtttatccgggcaaaccatcgaagtgaccagcgaatacctgttccgtcatagcgataacgagctcctgcactggatggtggcgctggatggtaagccgctggcaagcggtgaagtgcctctggatgtcgctccacaaggtaaacagttgattgaactgcctgaactaccgcagccggagagcgccgggcaactctggctcacagtacgcgtagtgcaaccgaacgcgaccgcatggtcagaagccgggcacatcagcgcctggcagcagtggcgtctggcggaaaacctcagtgtgacgctccccgccgcgtcccacgccatcccgcatctgaccaccagcgaaatggatttttgcatcgagctgggtaataagcgttggcaatttaaccgccagtcaggctttctttcacagatgtggattggcgataaaaaacaactgctgacgccgctgcgcgatcagttcacccgtgcaccgctggataacgacattggcgtaagtgaagcgacccgcattgaccctaacgcctgggtcgaacgctggaaggcggcgggccattaccaggccgaagcagcgttgttgcagtgcacggcagatacacttgctgatgcggtgctgattacgaccgctcacgcgtggcagcatcaggggaaaaccttatttatcagccggaaaacctaccggattgatggtagtggtcaaatggcgattaccgttgatgttgaagtggcgagcgatacaccgcatccggcgcggattggcctgaactgccagctggcgcaggtagcagagcgggtaaactggctcggattagggccgcaagaaaactatcccgaccgccttactgccgcctgttttgaccgctgggatctgccattgtcagacatgtataccccgtacgtcttcccgagcgaaaacggtctgcgctgcgggacgcgcgaattgaattatggcccacaccagtggcgcggcgacttccagttcaacatcagccgctacagtcaacagcaactgatggaaaccagccatcgccatctgctgcacgcggaagaaggcacatggctgaatatcgacggtttccatatggggattggtggcgacgactcctggagcccgtcagtatcggcggaattccagctgagcgccggtcgctaccattaccagttggtctggtgtcaaaaataataataaccgggcaggggggatccaattctgtgagcgtatggcaaacgaaggaaaaatagttatagtagccgcactcgatgggacatttcaacgtaaaccgtttaataatattttgaatcttattccattatctgaaatggtggtaaaactaactgctgtgtgtatgaaatgctttaaggaggcttccttttctaaacgattgggtgaggaaaccgagatagaaataataggaggtaatgatatgtatcaatcggtgtgtagaaagtgttacatcgactcataatattatattttttatctaaaaaactaaaaataaacattgattaaattttaatataatacttaaaaatggatgttgtgtcgttagataaaccgtttatgtattttgaggaaattgataatgagttagattacgaaccagaaagtgcaaatgaggtcgcaaaaaaactgccgtatcaaggacagttaaaactattactaggagaattattttttcttagtaagttacagcgacacggtatattagatggtgccaccgtagtgtatataggatctgctcccggtacacatatacgttatttgagagatcatttctataatttaggagtgatcatcaaatggatgctaattgacggccgccatcatgatcctattttaaatggattgcgtgatgtgactctagtgactcggttcgttgatgaggaatatctacgatccatcaaaaaacaactgcatccttctaagattattttaatttctgatgtgagatccaaacgaggaggaaatgaacctagtacggcggatttactaagtaattacgctctacaaaatgtcatgattagtattttaaaccccgtggcgtctagtcttaaatggagatgcccgtttccagatcaatggatcaaggacttttatatcccacacggtaataaaatgttacaaccttttgctccttcatattcagctgaaatgagattattaagtatttataccggtgagaacatgagactgactcgagttaccaaattagacgctgtaaattatgaaaaaaagatgtactaccttaataagatcgtccgtaacaaagtagttgttaactttgattatcctaatcaggaatatgactattttcacatgtactttatgctgaggaccgtgtactgcaataaaacatttcctactactaaagcaaaggtactatttctacaacaatctatatttcgtttcttaaatattccaacaacatcaactgaaaaagttagtcatgaaccaatacaacgtaaaatatctagcaaaaattctatgtctaaaaacagaaatagcaagagatccgtacgcggtaataaatagaaacgtactactgagatatactaccgatatagagtataatgatttagttactttaataaccgttagacataaaattgattctatgaaaactgtgtttcaggtatttaacgaatcatccataaattatactccggttgatgatgattatggagaaccaatcattataacatcgtatcttcaaaaaggtcataacaagtttcctgtaaattttctatacatagatgtggtaatatctgacttatttcctagctttgttagactagatactacagaaactaatatagttaatagtgtactacaaacaggcgatggtaaaaagactcttcgtcttcccaaaatgttagagacggaaatagttgtcaagattctctatcgccctaatataccattaaaaattgttagatttttccgcaataacatggtaactggagtagagatagccgatagatctgttatttcagtcgctgattaatcaattagtagagatgagataagaacattataataatcaataatatatcttatatcttatatcttatatcttatatcttgtttagaaaaatgctaatattaaaatagctaacgctagtaatccaatcggaagccatttgatatctataatagggtatctaatttcctgatttaaatagcggacagctatattctcggtagctactcgtttggaatcacaaacattatttacatctaatttactatctgtaatggaaacgtttcccaatgaaatggtacaatccgatacattgcattttgttatatttttttttaaagaggctggtaacaacgcatcgcttcgtttacatggctcgtaccaacaataatagggtaatcttgtatctattcctatccgtactatgcttttatcaggataaatacatttacatcgtatatcgtctttgttagcatcacagaatgcataaatttgttcgtccgtcatgataaaaatttaaagtgtaaatataactattatttttatagttgtaataaaaagggaaatttgattgtatactttcggttctttaaaagaaactgacttgataaaaatggctgtaatctctaaggttacgtatagtctatatgatcaaaaagagattaatgctacagatattatcattagtcatgttaaaaatgacgacgatatcggtaccgttaaagatggtagactaggtgctatggatggggcattatgtaagacttgtgggaaaacggaattggaatgtttcggtcactggggtaaagtaagtatttataaaactcatatagttaagcctgaatttatttcagaaattattcgtttactgaatcatatatgtattcactgcggattattgcgttcacgagaaccgtattccgacgatattaacctaaaagagttatcgggacacgctcttaggagattaaaggataaaatattatccaagaaaaagtcatgttggaacagtgaatgtatgcaaccgtatcaaaaaattactttttcaaagaaaaaggtttgtttcgtcaacaagttggatgatattaacgttcctaattctctcatctatcaaaagttaatttctattcatgaaaagttttggccattattagaaattcatcaatatccagctaacttattttatacagactactttcccatccctccgttgattattagaccggctattagtttttggatagatagtatacccaaagagaccaatgaattaacttacttattaggtatgatcgttaagaattgtaacttgaatgctgatgaacaggttatccagaaggcggtaatagaatacgatgatattaaaattatttctaataacactaccagtatcaatttatcatatattacatccggcaaaaataatatgattagaagttatatcgtcgcccgacgaaaagatcagaccgctagatctgtaattggtcccagtacatctatcaccgttaatgaggtaggaatgcccgcatatattagaaatacacttacagaaaagatatttgttaatgcctttacagtggataaagttaaacaactattagcgtcaaaccaagttaaattttactttaataaacgattaaaccaattaacaagaatacgccaaggaaagtttattaaaaataaaatacatttattgcctggtgattgggtagaagtagctgttcaagaatatacaagtattatttttggaagacagccgtctctacatagatacaacgtcatcgcttcatctatcagagctaccgaaggagatactatcaaaatatctcccggaattgccaactctcaaaatgctgatttcgacggggatgaggaatggatgatattagaacaaaatcctaaagctgtaattgaacaaagtattcttatgtatccgacgacgttactcaaacacgatattcatggagcccccgtttatggatctattcaagatgaaatcgtagcagcgtattcattgtttaggatacaagatctttgtttagatgaagtattgaacatcttggggaaatatggaagagagttcgatcctaaaggtaaatgtaaattcagcggtaaagatatctatacttacttgataggtgaaaagattaattatccgggtctcttaaaggatggtgaaattattgcaaacgacgtagatagtaattttgttgtggctatgaggcatctgtcattggctggactcttatccgatcataagtcgaacgtggaaggtatcaactttattatcaagtcatcttatgtttttaagagatatctatctatttacggttttggggtgacattcaaagatctgagaccaaattcgacgttcactaataaattggaggccatcaacgtagaaaaaatagaacttatcaaagaagcatacgccaaatatctcaacgatgtaagagacgggaaaatagttccattatctaaagctttagaggcggactatgtggaatccatgttatccaacttgacaaatcttaatatccgagagatagaagaacatatgagacaaacgctgatagatgatccagataataacctcctgaaaatggccaaagcgggttataaagtaaatcccacagaactaatgtatattctaggtacgtatggacaacaaaggattgatggtgaaccagcagagactcgagtattgggtagagttttaccttactatcttccagactctaaggatccagaaggaagaggttacattcttaattctttaacaaaaggattaacgggttctcaatattacttttcgatgctggttgccagatctcaatctactgatatcgtctgtgaaacatcacgtaccggaacactggctagaaaaatcattaaaaagatggaggatatggtggtcgacggatacggacaagtagttataggtaatacgctcatcaagtacgccgccaattataccaaaattctaggctcagtatgtaaacctgtagatcttatctatccagatgagtccatgacttggtatttggaaattagtgctctgtggaataaaataaaacagggattcgtttactctcagaaacagaaacttgcaaagaagacattggcgccgtttaatttcctagtattcgtcaaacccaccactgaggataatgctattaaggttaaggatctgtacgatatgattcataacgtcattgatgatgtgagagagaaatacttctttacggtatctaatatagattttatggagtatatattcttgacgcatcttaatccttctagaattagaattacaaaagaaacggctatcactatctttgaaaagttctatgaaaaactcaattatactctaggtggtggaactcctattggaattatttctgcacaggtattgtctgagaagtttacacaacaagccctgtccagttttcacactactgaaaaaagtggtgccgtcaaacaaaaacttggtttcaacgagtttaataacttgactaatttgagtaagaataagaccgaaattatcactctggtatccgatgatatctctaaacttcaatctgttaagattaatttcgaatttgtatgtttgggagaattaaatccaaacatcactcttcgaaaagaaacagataaatatgtagtagatataatagtcaatagattatacatcaagagagcagaaataaccgaattagtcgtcgaatatatgattgaacgatttatctcctttagcgtcattgtaaaggaatggggtatggagacattcattgaggacgaggataatattagatttactgtctacctaaatttcgttgaaccggaagaattgaatcttagtaagtttatgatggttcttccgggggcagccaacaagggaaagattagtaaattcaagattcctatctctgattatacgggatatgacgacttcaatcaaacaaaaaagctcaataagatgactgtagaactcatgaatctaaaagaattgggttctttcgatttggaaaacgtcaacgtgtatcctggagtatggaatacatacgatatcttcggtatcgaggccgctcgtgaatacttgtgcgaagccatgttaaacacctatggagaagggttcgattatctgtatcagccttgtgatcttctcgctagtttactatgtgctagttacgaaccagaatcagtgaataaattcaagttcggcgcagctagtactcttaagagagctacgttcggagacaataaagcattgttaaacgcggctcttcataaaaagtcagaacctattaacgataatagtagctgccacttttttagcaaggtccctaatataggaactggatattacaaatactttatcgacttgggtcttctcatgagaatggaaaggaaactatctgataagatatcttctcaaaagatcaaggaaatggaagaaacagaagacttttaattcttatcaataacatatttttctatgatctgtcttttaaacgatggattttccacaaatgcgcctctcaagtccctcatagaatgatacacgtataaaaaatatagcataggcaatgactccttatttttagacattagatatgccaaaatcatagccccgcttctatttactcccgcagcacaatgaaccaacacgggctcgtttcgttgatcacatttagataaaaaggcggttacgtcgtcaaaatatttactaatatcggtagttgtatcatctaccaacggtatatgaataatattaatattagagttaggtaatgtatatttatccatcgtcaaatttaaaacatatttgaacttaacttcagatgatggtgcatccatagcatttttataatttcccaaatacacattattggttacccttgtcattatagtgggagatttggctttgtgcatatctccagttgaacgtagtagtaagtatttatacaaacttttcttatccatttataacgtacaaatggataaaactactttatcggtaaacgcgtgtaatttagaatacgttagagaaaaggctatagtaggcgtacaagcagccaaaacatcaacacttatattctttgttattatattggcaattagtgcgctattactctggtttcagacgtctgataatccagtctttaatgaattaacgagatatatgcgaattaaaaatacggttaacgattggaaatcattaacggatagcaaaacaaaattagaaagtgatagaggtagacttctagccgctggtaaggatgatatatttgaattcaaatgtgtggatttcggcgcctattttatagctatgcgattggataagaaaacatatctgccgcaagctattaggcgaggtactggagacgcgtggatggttaaaaaggcggcaaaggtcgatccatctgctcaacaattttgtcagtatttgataaaacacaagtctaataatgttattacttgtggtaatgagatgttaaatgaattaggttatagcggttattttatgtcaccgcattggtgttccgattttagtaatatggaatagtgttagataaatgcggtaacgaatgttcctgtaaggaaccataacagcttagatttaacgttaaagatgagcataaacataataaacaaaattacaatcaaacttataacattaatatcaaacaatccaaaaaatgaaatcagtggagtagtaaacgcgtacataactcctggataacgtttagcagctgccgttcctattctagaccaaaaattcggtttcatgttttcgaaacggtattctgcaacaagtcgaggatcgtgttctacatatttggcggcattatccagtatctgcctattgatcttcatttcgttttcgattctggctatttcaaaataaaatcccgatgatagacctccagactttataatttcatctacgatgttcagcgccgtagtaactctaataatataggctgataagctaacatcataccctcctgtatatgtgaatatggcatgatttttgtccattacaagctcggttttaactttattgcctgtaataatttctctcatctgtaggatatctatttttttgtcatgcattgccttcaagacgggacgaagaaacgtaatatcctcaataacgttatcgttttctacaataactacatattctacctttttattttctaactcggtaaaaaaattagaatcccatagggctaaatgtctagcgatatttcttttcgtttcctctgtacacatagtgttacaaaaccctgaaaagaagtgagtatacttgtcatcatttctaatgtttcctccagtccactgtataaacgcataatccttgtaatgatctggatcatccttgactaccacaacatttcttttttctggcataacttcgttgtcctttacatcatcgaacttctgatcattaatatgctcatgaacattaggaaatgtttctgatggaggtctatcaataactggcacaacaataacaggagttttcaccgccgccatttagttattgaaattaatcatatacaactctttaatacgagttatattttcgtctatccattgtttcacattgacatatttcgacaaaaagatataaaatgcgtattccaatgcttctctgtttaatgaattactaaaatatacaaacacgtcactgtctggcaataaatgatatcttagaatattgtaacaatttattttgtattgcacatgttcgtgatctatgagttcttcttcgaatggcataggatctccgaatctgaaaacgtataaataggagttagaataataatatttgagagtattggtaatatataaactctttagcggtataattagtttttttctctcaatttctatttttagatgtgatggaaaaatgactaattttgtagcattagtatcatgaactctaatcaaaatcttaatatcttcgtcacacgttagctctttgaagtttttaagagatgcatcagttggttctacagatggagtaggtgcaacaattttttgttctacacatgtatgtactggagccattgttttaactataatggtgcttgtatcgaaaaactttaatgcagatagcggaagctcttcgccgcgactttctacgtcgtaattgggttctaacgccgatctctgaatggatactagttttctaagttctaatgtgattctctgaaaatgtaaatccaattcctccggcattatagatgtgtatacatcggtaaataaaactatagtatccaacgatcccttctcgcaaattctagtcttaaccaaaaaatcgtatataaccacggagatggcgtatttaagagtggattcttctaccgttttgttcttggatgtcatataggaaactataaagtccgcactactgttaagaatgattactaacgcaactatatagtttaaattaagcattttggaaacataaaataactctgtagacgatacttgactttcgaataagtttgcagacaaacgaagaaagaacagacctctcttaatttcagaagaaaactttttttcgtattcctgacgtctagagtttatatcaataagaaagttaagaattagtcggttaatgttgtatttcattacccaagtttgagatttcataatattatcaaaagacatgataatattaaagataaagcgctgactatgaacgaaatagctatatggttcgctcaagaatatagtcttgttaaacgtggaaacgataactgtatttttaatcacgtcagcggcatctaaattaaatataggtatatttattccacacactctacaatatgccacaccatcttcataataaataaattcgttagcaaaattattaattttagtgaaatagttagcgtcaactttcatagcttccttcaatctaatttgatgctcacacggtgcgaattccactctaacatcccttttccatgcctcaggttcatcgatctctataatatctagttttttgcgtttcacaaacacaggctcgtctctcgcgatgagatctgtatagtaactatgtaaatgataactagatagaaagatgtagctatatagatgacgatcctttaagagaggtataataactttaccccaatcagatagactgttgttatggtcttcggaaaaagaatttttataaatttttccagtattttccaaatatacgtacttaacatctaaaaaatccttaatgataataggaatggataatccgtctattttataaagaaatacatatcgcacattatacttttttttggaaatgggaataccgatgtgtctacataaatatgcaaagtctaaatattttttagagaatcttagttggtccaaattcttttccaagtacggtaatagatttttcatattgaacggtatcttcttaatctctggttctagttccgcattaaatgatgaaactaagtcactatttttataactaacgattacatcacctctaacatcatcatttaccagaatactgatcttcttttgtcgtaaatacatgtctaatgtgttaaaaaaaagatcatacaagttatacgtcatttcatctgtggtattcttgtcattgaaggataaactcgtactaatctcttctttaacagcctgttcaaatttatatcctatatacgaaaaaatagcaaccagtgtttgatcatccgcgtcaatattctgttctatcgtagtgtataacaatcgtatatcttcttctgtgatagtcgatacgttataaaggttgataacgaaaatatttttatttcgtgaaataaagtcatcgtaggattttggacttatattcgcgtctagtagatatgcttttatttttggaatgatctcaattagaatagtctctttagagtccatttaaagttacaaacaactaggaaattggtttatgatgtataatttttttagtttttatagattctttattctatacttaaaaaatgaaaataaatacaaaggttcttgagggttgtgttaaattgaaagcgagaaataatcataaattatttcattatcgcgatatccgttaagtttgtatcgtaatggcgtggtcaattacgaataaagcggatactagtagcttcacaaagatggctgaaatcagagctcatctaaaaaatagcgctgaaaataaagataaaaacgaggatattttcccggaagatgtaataattccatctactaagcccaaaaccaaacgagccactactcctcgtaaaccagcggctactaaaagatcaaccaaaaaggaggaagtggaagaagaagtagttatagaggaatatcatcaaacaactgaaaaaaattctccatctcctggagtcagcgacattgtagaaagcgtggccgctgtagagctcgatgatagcgacggggatgatgaacctatggtacaagttgaagctggtaaagtaaatcatagtgctagaagcgatctctctgacctaaaggtggctaccgacaatatcgttaaagatcttaagaaaattattactagaatctctgcagtatcgacggttctagaggatgttcaagcagctggtatctctagacaatttacttctatgactaaagctattacaacactatctgatctagtcaccgagggaaaatctaaagttgttcgtaaaaaagttaaaacttgtaagaagtaaatgcgtgcacttttttataaagatggtaaactctttaccgataataattttttaaatcctgtatcagacgataatccagcgtatgaggttttgcaacatgttaaaattcctactcatttaacagatgtagtagtatatgaacaaacgtgggaggaggcgttaactagattaatttttgtgggaagtgattcaaaaggacgtagacaatacttttacggaaaaatgcatgtacagaatcgcaacgctaaaagagatcgtatttttgttagagtatataacgttatgaaacgaattaattgttttataaacaaaaatataaagaaatcgtccacagattccaattatcagttggcggtttttatgttaatggaaactatgttttttattagatttggtaaaatgaaatatcttaaggagaatgaaacagtagggttattaacactaaaaaataaacacatagaaataagtcccgatgaaatagttatcaagtttgtaggaaaggacaaagtttcacatgaatttgttgttcataagtctaatagactatataaaccgctattgaaactgacggatgattctagtcccgaagaatttctgttcaacaaactaagtgaacgaaaggtatacgaatgtatcaaacagtttggtattagaatcaaggatctccgaacgtatggagtcaattatacgtttttatataatttttggacaaatgtaaagtccatatctcctcttccgtcaccaaaaaagttaatagcattaactatcaaacaaactgctgaagtggtaggtcatactccatcaatttcaaaaagagcttatatggcaacgactattttagaaatggtaaaggataaaaattttttagatgtagtatctaaaactacgttcgatgaattcctatctatagtcgtagatcacgttaaatcatctacggatggatgatatagatctttacacaaataattacaagaccgataaatggaaatggataagcgtatgaaatctctcgcaatgacagctttcttcggagagctaagcacattagatattatggcattgataatgtctatatttaaacgccatccaaacaataccattttttcagtggataaggatggtcagtttatgattgatttcgaatacgataattataaggcttctcaatatttggatctgaccctcactccgatatctggagatgaatgcaagactcacgcatcgagtatagccgaacaattggcgtgtgcggatattattaaagaggatattagcgaatatatcaaaactactccccgtcttaaacgatttataaaaaaataccgcaatagatcagatactcgtatcagtcgagatacagaaaagcttaaaatagctctagctaaaggcatagattacgaatatataaaagacgcttgttaataagtaaatgaaaaaaaactagtcgtttataataaaacacgatatggatgccaacgtagtatcattttctactattgcgacgtatatagacgctttagcgaagaatgcttcggaattagaacagaggtctaccgcatacgaaataaataatgaattggaactagtatttattaagccgccattgattactttgacaaatgtagtgaatatctctacgattcaggaatcgtttattcgatttaccgttactaataaggaaggtgttaaaattagaactaagattccattatctaaggtacatggtctagatgtaaaaaatgtacagttagtagatgctatagataacatagtttgggaaaagaaatcattagtgacggaaaatcgtcttcacaaagaatgcttgttgagactatcgacagaggaacgtcatatatttttggattacaagaaatatggatcctctatccgactagaattagtcaatcttattcaagcaaaaacaaaaaactttacgatagactttaagctaaaatattttctaggatccggtgcccagtctaaaagttctttgttgcacgctattaatcatccaaagtcaaggcctaatacatctctggaaatagaattcacacctagagacaatgaaacagttccatatgatgaactaataaaggaattgacgactctctcgcgtcatatatttatggcttctccagagaatgtaattctttctccgcctattaacgcgcctataaaaacctttatgttgcctaaacaagatatagtaggtttggatctggaaaatctatatgccgtaactaagactgacggcattcctataactatcagagttacatcaaacgggttgtattgttattttacacatcttggttatattattagatatcctgttaagagaataatagattccgaagtagtagtctttggtgaggcagttaaggataagaactggaccgtatatctcattaagctaatagagcctgtgaatgcaatcaatgatagactagaagaaagtaagtatgttgaatctaaactagtggatatttgtgatcggatagtattcaagtcaaagaaatacgaaggtccgtttactacaactagtgaagtcgtcgatatgttatctacatatttaccaaagcaaccagaaggtgttattctgttctattcaaagggacctaaatctaacattgattttaaaattaaaaaggaaaatactatagaccaaactgcaaatgtagtatttaggtacatgtccagtgaaccaattatctttggagaatcgtctatctttgtagagtataagaaatttagcaacgataaaggctttcctaaagaatatggttctggtaagattgtgttatataacggcgttaattatctaaataatatctattgtttggaatatattaatacacataatgaagtgggtattaagtccgtggttgtacctattaagtttatagcagaattcttagttaatggagaaatacttaaacctagaattgataaaaccatgaaatatattaactcagaagattattatggaaatcaacataatatcatagtcgaacatttaagagatcaaagcatcaaaataggagatatctttaacgaggataaactatcggatgtgggacatcaatacgccaataatgataaatttagattaaatccagaagttagttattttacgaataaacgaactagaggaccgttgggaattttatcaaactacgtcaagactcttcttatttctatgtattgttccaaaacatttttagacgattccaacaaacgaaaggtattggcgattgattttggaaacggtgctgacctggaaaaatacttttatggagagattgcgttattggtagcgacggatccggatgctgatgctatagctagaggaaatgaaagatacaacaaattaaactctggaattaaaaccaagtactacaaatttgactacattcaggaaactattcgatccgatacatttgtctctagtgtcagagaagtattctattttggaaagtttaatatcatcgactggcagtttgctatccattattcttttcatccgagacattatgctaccgtcatgaataacttatccgaactaactgcttctggaggcaaggtattaatcactaccatggacggagacaaattatcaaaattaacagataaaaagacttttataattcataagaatttacctagtagcgaaaactatatgtctgtagaaaaaatagctgatgatagaatagtggtatataatccatcaacaatgtctactccaatgactgaatacattatcaaaaagaacgatatagtcagagtgtttaacgaatacggatttgttcttgtagataacgttgatttcgctacaattatagaacgaagtaaaaagtttattaatggcgcatctacaatggaagatagaccgtctacaaaaaactttttcgaactaaatagaggagccattaaatgtgaaggtttagatgtcgaagacttacttagttactatgttgtttatgtcttttctaagcggtaaataataatatggtatgggttctgatctcccagttctaaatgcattaaataattccaatagagcgatttttgttcctataggaccttccaactgtggatactctgtattgttaatagatatattaatacttttgtcgggtaacagaggttctacgtcttctaaaaataaaagttttataacatctggcctgttcataaataaaaacttggcgattctatatatactcttattatcaaatctagccattgtcttatagatgtgagctactgtaggtgtaccatttgattttctttctaatactatatatttctctcgaagaagttcttgcacatcatctgggaataaaatactactgttgagtaaatcagttattttttttatatcgatattgatggacatttttatagttaaggataataagtatcccaaagtcgataacgacgataacgaagtatttatacttttaggaaatcacaatgactttatcagattaaaattaacaaaattaaaggagcatgtatttttttctgaatatattgtgactccagatacatatggatctttatgcgtcgaattaaatgggtctagttttcagcacggcggtagatatatagaggtggaggaatttatagatgctggaagacaagttagatggtgttctacatccaatcatatatctaaagatatacccgaagatatgcacactgataaatttgtcatttatgatatttatacgtttgattcgttcaagaataaacgattggtattcgtacaggtacctccgtcgttaggagatgatagtcatttgactaatccgttattgtcaccgtattatcgtaattcagtagccagacaaatggtcaatgatatgatttttaatcaagattcatttttaaaatatttattagaacatctgattagaagccactatagagtttctaaacatataacaatagttagatacaaggataccgaagaattaaatctaacgagaatatgttataatagagataagtttaaggcgtttgtattcgcttggtttaacggcgtttcggaaaatgaaaaggtactagatacgtataaaaaggtatctaatttgatataatgaattcagtgactgtatcacacgcgccatatactattacttatcacgatgattgggaaccagtaatgagtcaattggtagagttttataacgaagtagccagttggctgctacgagacgagacgtcgcctattcctgataagttctttatacagttgaaacaaccgcttagaaataaacgagtatgtgtgtgtggtatagatccgtatccgaaagatggaactggtgtaccgttcgaatcaccaaattttacaaaaaaatcaattaaggagatagcttcatctatatctagattaaccggagtaattgattataaaggttataaccttaatataatagacggggttataccctggaattattacttaagttgtaaattaggagaaacaaaaagtcacgcgatttactgggataagatttccaagttactgctgcagcatataactaaacacgttagtgttctttattgtttgggtaaaacagatttctcgaatatacgggccaagttagaatccccggtaactaccatagtcggatatcatccagcggctagagaccgccaattcgagaaagatagatcatttgaaattatcaacgttttactggaattagacaacaaggcacctataaattgggctcaagggtttatttattaatgctttagtgaaattttaacttgtgttctaaatggatgcggctattagaggtaatgatgttatctttgttcttaagactataggtgtcccgtcagcgtgcagacaaaatgaagatccaagatttgtagaagcatttaaatgcgacgagttagaaagatatattgagaataatccagaatgtacactattcgaaagtcttagggatgaggaagcatactctatagtcagaattttcatggatgtagatttagacgcgtgtctagacgaaatagattatttaacggccattcaagattttattatcgaggtgtcaaactgtgtagctagattcgcgtttacagaatgcggcgccattcatgaaaatgtaataaaatccatgagatctaatttttcattgactaagtctacaaatagagataaaacaagttttcatattatctttttagatacgtataccactatggatacattgatagctatgaaacgaacactattagaattaagtagatcatctgaaaatccactaaccagatcgatagacactgccgtatataggagaaaaacaactcttcgggttgtaggtactaggaaaaatccaaattgcgacactattcatgtaatgcaaccaccgcatgataatatagaagattacctattcacttacgtggatatgaacaacaatagttattacttttctctacaacaacgattggaggatttagttcctgataagttatgggaaccagggtttatttcattcgaagacgctataaaaagagtttcaaaaatattcattaattctataataaactttaatgatctcgatgaaaataattttacaacggtaccactggtcatagattacgtaacaccttgtgcattatgtaaaaaacgatcgcataaacatccgcatcaactatcgttggaaaatggtgctattagaatttacaaaactggtaatccacatagttgtaaagttaaaattgttccgttggatggtaataaactgtttaatattgcacaaagaattttagacactaactctgttttattaaccgaacgaggagaccatatagtttggattaataattcatggaaatttaacagcgaagaacccttgataacaaaactaattttgtcaataagacatcaactacctaaggaatattcaagcgaattactctgtccaagaaaacgaaagactgtagaagctaacatacgagacatgttagtagattcagtggagaccgatacctatccggataaacttccgtttaaaaatggtgtattggacctggtagacggaatgttttactctggagatgatgctaaaaaatatacgtgtactgtatcaaccggatttaaatttgacgatacaaagttcgtcgaagacagtccagaaatggaagagttaatgaatatcattaacgatatccaaccattaacggatgaaaataagaaaaatagagagctatatgaaaaaacattatctagttgtttatgcggtgctaccaaaggatgtttaacattcttttttggagaaactgcaactggaaagtcgacaaccaaacgtttgttaaagtctgctatcggtgacctgtttgttgagacgggtcaaacaattttaacagatgtattggataaaggacctaatccatttatcgctaacatgcatttgaaaagatctgtattctgtagcgaactacctgattttgcctgtagtggatcaaagaaaattagatctgacaatattaaaaagttgacagaaccttgtgtcattggaagaccgtgtttctccaataaaattaataatagaaaccatgcgacaatcattatcgatactaattacaaacctgtttttgataggatagataacgcattaatgagaagaattgccgtcgtgcgattcagaacacacttttctcaaccttctggtagagaggctgctgaaaataatgacgcgtacgataaagtcaaactattagacgaggggttagatggtaaaatacaaaataatatatatagatttgcatttctatacttgttggtgaaatggtacaaaaaatatcatgttcctattatgaaactatatcctacacccgaagagattcctgactttgcattctatctcaaaataggtactctgttggtatctagctctgtaaagcatattccattaatgacggacctctccaaaaagggatatatattgtacgataatgtggtcactcttccgttgactactttccaacagaaaatatccaagtattttaattctagactatttggacacgatatagagagcttcatcaatagacataagaaatttgccaatgttagtgatgaatatctgcaatatatattcatagaggatatttcatctccgtaaatatatgctcatatatttatagaagatatcacatatctaaatgaataccggaatcatagatttatttgataatcatgttgatagtataccaactatattacctcatcagttagctactctagattatctagttagaactatcatagatgagaacagaagcgtgttattgttccatattatgggatcaggtaaaacaataatcgctttgttgttcgccttggtagcttccagatttaaaaaggtttacattctagtgccgaacatcaacatcttaaaaattttcaattataatatgggtgtagctatgaacttgtttaatgacgaattcatagctgagaatatctttattcattccacaacaagtttttattctcttaattataacgataacgtcattaattataacggattatctcgctacaataactctatttttatcgttgatgaggcacataatatctttgggaataatactggagaacttatgaccgtgataaaaaataaaaacaagattccttttttactattgtctggatctcccattactaacacacctaatactctgggtcatattatagatttaatgtccgaagagacgatagattttggtgaaattattagtcgtggtaagaaagtaattcagacacttcttaacgaacgcggtgtgaatgtacttaaggatttgcttaaaggaagaatatcatattacgaaatgcctgataaagatctaccaacgataagatatcacggacgtaagtttctagatactagagtagtatattgtcacatgtctaaacttcaagagagagattatatgattactagacgacagctatgttatcatgaaatgtttgataaaaatatgtataacgtgtcaatggcagtattgggacaacttaatctgatgaataatttagatactttatttcaggaacaggataaggaattgtacccaaatctgaaaataaataatggcgtgttatacggagaagaattggtaacgttaaacattagttccaaatttaaatactttattaatcggatacagacactcaacggaaaacattttatatacttttctaattctacatatggcggattggtaattaaatatatcatgctcagtaatggatattctgaatataatggttctcagggaactaatccacatatgataaacggcaaaccaaaaacatttgctatcgttactagtaaaatgaaatcgtctttagaggatctattagatgtgtataattctcctgaaaacgatgatggtagtcaattgatgtttttgttttcatcaaacattatgtccgaatcctatactctaaaagaggtaaggcatatttggtttatgactatcccagatactttttctcaatacaaccaaattcttggacgatctattagaaaattctcttacgccgatatttctgaaccagttaatgtatatcttttagccgccgtatattccgatttcaatgacgaagtgacgtcattaaacgattacacacaggatgaattaattaatgttttaccatttgacatcaaaaagctgttgtatctaaaatttaagacgaaagaaacgaatagaatatactctattcttcaagagatgtctgaaacgtattctcttccaccacatccatcaattgtaaaagttttattgggagaattggtcagacaatttttttataataattctcgtattaagtataacgataccaagttacttaaaatggttacatcagttataaaaaataaagaagacgctaggaattacatagatgatattgtaaacggtcacttctttgtatcgaataaagtatttgataaatctcttttatacaaatacgaaaacgatattattacagtaccgtttagactttcctacgaaccatttgtttggggagttaactttcgtaaagaatataacgtggtatcttctccataaaactgatgagatatataaagaaataaatgtcgagctttgttaccaatggatacctttccgttacattggaaccacacgagctgacgttagacataaaaactaatattaggaatgccgtatataagacgtatctccatagagaaattagtggtaaaatggccaagaaaatagaaattcgtgaagacgtggaattacctctcggcgaaatagttaataattctgtagttataaacgttccgtgtgtaataacctacgcgtattatcacgttggggatatagtcagaggaacattaaacatcgaagatgaatcaaatgtaactattcaatgtggagatttaatctgtaaactaagtagagattcgggtactgtatcatttagcgattcaaagtactgcttttttcgaaatggtaatgcgtatgacaatggcagcgaagtcactgccgttctaatggaggctcaacaaggtatcgaatctagttttgtttttctcgcgaatatcgtcgactcataaaaaagagaatagcggtaagtataaacacgaatactatggcaataattgcgaatgttttattctcttcgatatatttttgataatatgaaaaacatgtctctctcaaatcggacaaccatctcataaaatagttctcgcgcgctggagaggtagttgccgctcgtataatctctccagaataatatacttgcgtgtcgtcgttcaatttatacggatttctatagttctctgttatataatgcggtttgccctcatgattagacgacgacaatagtgttctaaatttagatagttgatcagaatgaatgtttattggcgttggaaaaattatccatacagcgtctgcagagtggttgatagttgttcctagatatgtaaaataatccaacttactaggcagcaaattgtctagataaaatactgaatcaaacggtgcagacgtattggcggatctaatggaatccaattgattaactatcttttgaaaatatacatttttatgatccaatacttgtaagaatatagaaataatgataagtccatcatcgtgtttttttgcctcttcataagaactatattttttcttattccaatgaacaagattaatctctccagagtatttgtacacatctatcaagtgattggatccataatcgtcttcctttccccaatatatatgtagtgatgataacacatattcattggggagaaaccctccacttatatatcctcctttaaaattaatccttactagttttccagtgttctggatagtggttggtttcgactcattataatgtatgtctaacggcttcaatcgcgcgttagaaattgcttttttagtttctatattaataggagatagttgttgcggcatagtaaaaatgaaatgataactgtttaaaaatagctcttagtatgggaattacaatggatgaggaagtgatatttgaaactcctagagaattaatatctattaaacgaataaaagatattccaagatcaaaagacacgcatgtgtttgctgcgtgtataacaagtgacggatatccgttaataggagctagaagaacttcattcgcgttccaggcgatattatctcaacaaaattcagattctatctttagagtatccactaaactattacggtttatgtactacaatgaactaagagaaatctttagacggttgagaaaaggttctatcaacaatatcgatcctcactttgaagagttaatattattgggtggtaaactagataaaaaggaatctattaaagattgtttaagaagagaattaaaagaggaaagtgatgaacgtataacagtaaaagaatttggaaatgtaattctaaaacttacaacacgggataaattatttaataaagtatatataagttattgcatggcgtgttttattaatcaatcgttggaggatttatcgcatactagtatttacaatgtagaaattagaaagattaaatcattaaatgattgtattaacgacgataaatacgaatatctgtcttatatttataatatgctagttaatagtaaatgaacttttacagatctagtataattagtcagattattaagtataatagacgactagctaagtctattatttgcgaggatgactctcaaattattacactcacggcattcgttaaccaatgcctatggtgtcataaacgagtatccgtgtccgctattttattaactactgataacaaaatattagtatgtaacagacgagatagttttctctattctgaaataattagaactagaaacatgtttagaaagaaacgattatttctgaattattccaattatttgaacaaacaggaaagaagtatactatcgtcatttttttctctagatccagctactactgataatgatagaatagacgctatttatccgggtggcatacccaaaaggggtgagaatgttccagagtgtttatccagggaaattaaagaagaagttaatatagacaattcttttgtattcatagacactcggttttttattcatggcatcatagaagataccattattaataaattttttgaggtaatcttctttgtcggaagaatatctctaacgagtgatcaaatcattgatacatttaaaagtaatcatgaaatcaaggatctaatatttttagatccgaattcaggtaatggactccaatacgaaattgcaaaatatgctctagatactgcaaaacttaaatgttacggccatagaggatgttattatgaatcattaaaaaaattaactgaggatgattgattaaaaaatataaattaatttaccatcgtgtatttttataacgggattgtccggcatatcatgtagatagttaccgtctacatcgtatactcgaccatctacgcctttaaatcctctatttattgacattaatctattagaattggaataccaaatattagtaccctcaattagtttattggtaatattttttttagacgatagatcgatggctcttgaaaccaaggttttccaaccggactcattgtcgatcggtgagaagtctttttcattagcatgaatccattctaatgatgtatgtttaaacactctaaacaattggacaaattcttttgatttgctttgaatgatttcaaataggtcttcgtctacagtaggcataccattagataatctagccattataaagtgcacgtttacatatctacgttctggaggagtaagaacgtgactattgagacgaatggctcttcctactatctgacgaagagacgcctcgttccatgtcatatctaaaatgaagatatcattaattgagaaaaaactaataccctcgcctccactagaagagaatacgcatgttttaatgcattctccgttagtgtttgattcttggttaaactcagccaccgccttgattctagtatcttttgttctagatgagaactctatattagagataccaaagactttgaaatatagtaataagatttctattcctgactgattaacaaatggttcaaagactagacatttaccatgggatgctaatattcccaaacatacatctataaatttgacgcttttctcttttaattcagtaaatagagagatatcagccgcactagcatcccctttcaatagttctccctttttaaaggtatctaatgcggatttagaaaactctctatctcttaatgaatttttaaaatcattatatagtgttgctatctcttgcgcgtattcgcccggatcacgattttgtctttcaggaaagctatcgaacgtaaacgtagtagccatacgtctcagaattctaaatgatgatatacctgtttttatttcagcgagtttagccttttgataaatttcttcttgctttttcgacatattaacgtatcgcattaatactgttttcttagcgaatgatgcagacccttctacgtcatcaaaaatagaaaactcgttattaactatatacgaacatagtcctcctagtttggagactaattctttttcatcgactagacgtttattctcaaatagcgattggtgttgtaaggatcctggtcgtagtaagttaaccaacatggtgaattcttgcacactattgacgataggtgtagccgataaacaaatcatcttatggttttttaacgcaatggtcttagataaaaaattatatactgaacgagtaggacggatcttaccatcttctttgattaatgatttagaaatgaagttatgacattcatcaataatgacgcatattctactcttggaattaatagttttgatattagtaaaaaatttatttctaaaattttgatcatcgtaattaataaaaatacaatccttcgttatctctggagcgtatctgagtatagtgttcatccaaggatcttctatcaaagcctttttcaccaataagataatagcccaattcgtataaatatccttaagatgtttgagaatatatacagtagtcattgttttaccgacacccgtttcatggaacaataaaagagaatgcatactgtctaatcctaagaaaactcttgctacaaaatgttgataatccttgaggcgtactacgtccgaccccatcatttcaacgggcatattagtagttctgcgtaaggcataatcgatataggccgcgtgtgatttactcatttatgagtgataagtaataactatgttttaaaaatcacagcagtagtttaactagtcttctctgatgtttgttttcgatactttttgaatcagaagtcatactagaataaagcaacgagtgaacgtaatagagagcttcgtatactctattcgaaaactctaagaacttattaatgaattccgtatccactggattgtttaaaatactaaattgaacactgttcacatccttccaagaagaagacttagtgacggacttaacatgagacataaataaatccaaattttttttacaaacatcactagccaccataatggcgctatctttcaaccagctatcgcttacgcattttagcagtctaacatttttaaagagactacaatatattctcatagtatcgattacacctctaccgaataaagttggaagtttaataatacaatatttttcgtttacaaaatcaaataatggtcgaaacacgtcgaaggttaacatcttataatcgctaatgtatagattgttttcagtgagatgattattagatttaatagcatctcgttcacgtttgaacagtttattgcgtgcgctgaggtcggcaactacggcgtccgctttagtactcctcccataatactttacgctattaatctttaaaatttcatagactttatctagatcgctttctggtaacatgatatcatgtgtaaaaagttttaacatgtcggtcggcattctatttagatcattaactctagaaatctgaagaaagtaattagctccgtattccagactaggtaatgggcttttacctagagacagattaagttctggcaatgtttcataaaatggaagaaggacatgcgttccctcccggatattttttacaatttcatccatttacaactctatagtttgttttcattattattagttattatctcccataatcttggtaatacttaccccttgatcgtaagataccttatacaggtcattacatacaactaccaattgtttttgtacataatagattggatggttgacatccatggtggaataaactactcgaacagatagtttatctttccccctagatacattagccgtaatagttgtcggcctaaagaatatctttggtgtaaagttaaaagttagggttcttgttccattattgctttttgtcagtagttcattataaattctcgagatgggtccgttctctgaatatagaacatcatttccaaatctaacttctagtctagaaataatatcggtcttattcttaaaatctattcccttgatgaagggatcgttaatgaacaaatccttggcctttgattcggctgatctattatctccgttatagacgttacgttgactagtccaaagacttacaggaatagatgtatcgatgatgttgatactatgtgatatgtgagcaaagattgttctcttagtggcatcactatatgttccagtaatggcggaaaactttttagaaatgttatatataaaagaattttttcgtgttccaaacattagcagattagtatgaagataaacactcatattatcaggaacattatcaatttttacatacacatcagcatcttgaatagaaacgataccatcttctggaacctctacgatctcggcagactccggataaccagtcggtgggccatcgctaacaataactagatcatccaacaatctactcacatatgcatctatataatctttttcatcttgtgagtaccctggatacgaaataaatttattatccgtatttccataataaggtttagtataaacagagagagatgttgccgcatgaacttcagttacagtcgccgttggttggtttatttgacctattactctcctaggtttctctataaacgatggtttaatttgtacattcttaaccatatatccaataaagctcaattcaggaacataaacaaattctttgttgaacgtttcaaagtcgaacgaagagtcacgaataacgatatcggatactggattgaaggttaccgttacggtaatttttgaatcggatagtttaagactgctgaatgtatcttccacatcaaacggagttttaatataaacgtatactgtagatggttctttaatagtgtcattaggagttaggccaatagaaatatcattaagttcactagaatatccagagtgtttcaaagcaattgtattattgatacaattattatataattcttcgccctcaatttcccaaataacaccgttacacgaagagatagatacgtgattaatacatttatatccaacatatggtacgtaactgaatcttcccatacctttaacttctggaagttccaaactcagaaccaaatgattaagcgcagtaatatactgatccctaatttcgaagctagcgatagcctgattgtctggaccatcgtttgtcataactccggatagagaaatatattgcggcatatacaaagttggaatttgactatcgactgcgaagacattagaccgtttaatagagtcatccccaccgatcaaagaattaatgatagtattattcattttctatttaaaatggaaaaagcttacaataaactccgtagagaaatatctataatttgtgagttttccttaaagtaacagcttccgtaaacgccgtctttatctcttagtaggtttattgtatttatgaccttttccttatcttcatagaatactaaaggcaacaaagaaatttttggttcttctctaagagctacgtgagacttaaccatagaagccaacgaatccctacatattttagaacagaaataccctacttcaccacccttgtatgtctcaatactaataggtctaaaaaccaaatcttgattacaaaaccaacacttatcaattacactatttgtcttaatagacacatctgccatagatttataatactttggtagtatacaagcgagtgcttcttctttagcgggcttaaagactgctttaggtgctgaaataaccacatctggaaggcttactcgcttagccatttaattacggaactatttttttatacttctaatgagcaagtagaaaacctctcatctacaaaaacgtactcgtgtccataatcctctaccatagttacacgttttttagatctcatatgtgctaaaaagttttcccatactaattggttactattatttttcgtataatttttaacagtttgaggttttagatttttagttacagaagtgatatcgaatattttatccaaaaagaatgaataattaattgtcttagaaggagtgttttcttggcaaaagaataccaagtgcttaaatatttctactacttcattaatcttttctgtactcagattcagtttctcatcttttacttgattgattatttcaaagactaacttataatcctttttatttattctctcgttagccttaagaaaactagatacaaaatttgcatctacatcatccgtggatatttgatttttttccatgatatccaagagttccgagataatttctccagaacattgatgagacaataatctccgcaatacatttctcaaatgaataagtttattagacacgtggaagtttgactttttttgtacctttgtacatttttgaaataccgactcgcaaaaaatacaatattcatatccttgttcagatactataccgttatgtctacaaccgctacataatcgtagattcatgttaacactctacgtatctcgtcgtccaatattttatataaaaacattttatttctagacgttgccagaaaatcctgtaatatttttagttttttgggctgtgaataaagtatcgccctaatattgttaccgtcttccgccaatatagtagttaaattatccgcacatgcagaagaacaccgcttaggcggattcagtacaatgttatatttttcgtaccaactcatttaaatatcataatctaaaatagttctgtaatatgtctagcgctaatatattgatcataatcctgtgcataaattaagatacaacaatgtctcgaaatcatcgacatggcttcttccatagttagaagatcgtcgtcaaagttagcaacgtgattcatcaacatttgctgttttgaggcagcaaatactgaaccgtcgccattcaaccattcataaaaaccatcgtctgaatccattgataatttcttgtactggtttttgagagctcgcatcaatctagcatttctagctcccggattgaaaacagaaagaggatcgtacatccagggtccattttctgtaaatagaatcgtataatgtcccttcaagaagatatcagacgatccacaatcaaagaattggtctccgagtttgtaacaaactgcggactttaacctatacatgataccgtttagcataatttctggtgatacgtcaatcggagtatcatctattagagatctaaagccggtgtaacattctccaccaaacatattcttattctgacgtcgttctacataaaacatcattgctccattaacgataacaggggaatgaacagcactacccatcacattagttcccaatggatcaatgtgtgtaactccagaacatcttccatagcctatgttaggaggagcgaacaccactcttccactattgccatcgaatgccatagaataaatatccttggaattgatagaaatcggactgtcggatgttgtgatcatcttcataggattaacaactatgtatggtgccgcctgaagtttcatatcgtaactgatgccgtttataggtctagccacagaaaccaacgtaggtctaaatccaactatagacaaaatagaagccaatatctgttcctcatctgtcataacttgagagcatccagtatgaataatcttcattagatggggatctaccgcatcatcatcgttacaataaaaaattcccattctaatgttcataattgcttttctaatcatggtatgcatgtttgctctctgaatctctgtggaaattagatctgatacacctgtaatcactatcggattatcctccgtaagacgattaaccaacaacatataattataagactttacttttctaaattcataaagttgctggattaggctataggtgtctccatgtacatacgcgttctcgagcgcaggaagtttaataccgaatagtgccatcagaataggatgaatatagtaattagtttctggttttctataaataaaagacaaatcttgtgaactagacatatcggtaaaatgcatggattggaatcgtgtagtcgacagaagaatatgatgattagatggagagtatattttatctaactctttgagttggtcaccgattctaggactagctcgagaatgaataagtactaaaggatgagtacatttcacagaaacactagcattgttcaatgtgctctttacatgggtaaggagttgaaatagctcgtttctatttgttctgacaatatttagtttattcataatgttaagcatatcctgaatagtaaagttagatgtgtcatacttgttagtagttagatatttagcaattgcattcccatcatttctcaatctcgtactccaatcatgcgtggatgctacttcgtcgatggaaaccatacaatcctttttgataggctgttgagattgatcatttcctgcacgtttaggtttggtacgttgatttctagcccctgcggatataaagtcatcgtctacaatttgggacaatgaattgcatacactacaagacaaagatttatcagaagtgtgaatatgatcttcatctaccaaagaaagagtttgattagtataactagattttagtcctgcgttagatgttaaaaaaacatcgctattgaccacggcttccattatttatattcgtagtttttactcgaaagcgtgattttaatatccaatcttattacttttggaatcgttcaaaacctttgactagttgtagaatttgatctattgccctacgcgtatactcccttgcatcatatacgttcgtcaccagatcgtttgtttcggcctgaagttggtgcatatctctttcaacattcgacatgagatccttaagggccatatcgtctagattttgttgagatgctgctcctggatttggattttgttgtgctgttgtacatactgtaccaccagtaggtgtaggagtacatacagtggccacaataggaggttgagaaagtgtaaccgttggagtagtacaagaaatacttccatccgattgttgtgtacatgtagttgttggtaacgtctgagaaggttgggtagatggcggcgtcgtcgttttttgatctttattaaatttagagataatatcctgaacagcattgctcggcgtcaacgctggaaggagtgaactcgccggcgcatcagtatcttcagacagccaatcaaaaagattagacatatcagatgatgtattagtttgttgtcgtggttttggtgtaggagcagtactactaggtagaagaataggagccgatgtagctgttggaaccggctgtggagttatatgaatagttggttgtagcggttggataggctgtctgctggcggccatcatattatctctagctagttgttctcgcaactgtctttgataatacgactcttgagactttagtcctatttcaatcgcttcatcctttttcgtatccggatccttttcttcagaataatagattgacgactttggtgtagaggattctgccagcctctgtgagaacttgttaaagaagtccatttaaggctttaaaattgaattgcgattataagattaaatggcagacacagacgatattatcgactatgaatccgatgatctcaccgaatacgaggatgatgaagaagaggaagaagatggagagtcactagaaactagtgatatagatcccaaatcttcttataagattgtagaatcagcatccactcatatagaagatgcgcattccaatcttaaacatatagggaatcatatatctgctcttaaacgacgctatactagacgtataagtctatttgaaatagcgggtataatagcagaaagctataacttgcttcaacgaggaagattacctctagtttcagaattttctgacgaaacgatgaagcaaaatatgctacatgtaattatacaagagatagaggagggttcttgtcctatagtcatcgaaaagaacggagaattgttgtcggtaaacgattttgacaaagatggtctaaaattccatctagactatattatcaaaatttggaaacttcaaaaacgatattagaatttatacgaatatcgttctctaaatgtcacaatcaagtctcgcatgttcagcaatttattgtcgtactttatatcgtgttcattaacgatatcttgcaaaatagtaatgattctatcttccttcgatagatattcttcagagattattgtcttatattctttcttgttatcagatatgaatttgataagactttgaacattattgatacccgtctgtttaattttttctacagatattttagttttggcagattctatcgtatctgtcaatagacatccaacatcgacattcgacgtcaattgtctataaatcaacgtataaattttagaaataacattagcgaattgttgtgcgttgatgtcgttattctgaaacagtatgattttaggtagcattttcttaacaaagagaacgtatttattgttactcagttgaacagatgatatatccagattactaacgcatctgattccgtataccaaactttcagaagaaatggtatacaattgtttgtattcattcaatgtctctttttcagaaattagtttagagtcgaatactgcaataattttcaagagatagttttcatcagataagattttatttagtgtagatatgataaaactattgttttgttggagaacttgatacgccgcgttctctgtagtcgacgctctcaaatgggaaacaatctccattatttttttggaatcggatactatatcttcggtatcttgacgcagtctagtatacatagagttaagagagattagagtttgtacattaagcaacatgtctctaaatgtggctacaaacttttcctttttcacatcatctagtttattatataccgatttcacaacggcaccagatttaaggaaccagaatgaaaaactctgataactacaatatttcatcatagttacgattttatcatcttctatagttggtgtaatagcgcatacctttttctccaagactggaaccaacgtcataaaaatgtttaaatcaaaatccatatcaacatctgatgcgctaagaccagtctcgcgttcaagattatctttactaatggtgacgaactcatcgtataaaactctaagtttgtccattatttatttacagatttagttgtttaatttatttgtgctcttccagagttgggatagtatttttctaacgtcggtattatattattaggatctacgttcatatgtatcataatattaatcatccacgttttgataaatctatctttagcttctgaaataacgtatttaaacaaaggagaaaaatatttagctacggcatcagacgcaataacattttttgtaaatgtaacgtatttagacgacagatcttcgttaaaaagttttccatctatgtagaatccatcggttgttaacaccattcccgcgtcagattgaataggagtttgaatagtttgttttggaaatagatccttcaataacttatagttgggtgggaaaaaatcgattttatcactagactctttcttttttactatcattacctcatgaactatttcttgaatgagtatatgtattttctttcctatatcggacgcgttcattggaaaatataccatgtcgttaactataagaatatttttatcctcgtttacaaactgaataatatcagatgtagttcgtaaacgaactatatcatcaccagcacaacatctaactatatgatatccactagtttcctttagccgtttattatcttgttccatattagcagtcattccatcatttaagaaggcgtcaaaaataatagggagaaatgacattttggattctgttacaactttaccaaaattaaggatatacggacttactatctttttctcaacgtcaatttgatgaacacacgatgaaaatgtgcttctatgagattgatcatgtagaaaacaacaagggatacaatatttccgcatatcatgaaatatattaagaaatcccaccttattatatttccccaaaggatccatgcacgtaaacattatgccgttatcattaataaagacttctttctcatcggatctgtaaaagttgttactgatttttttcattccaggatctagataattaataatgatgggttttctattcttattctttgtattttggcatatcctagaccagtaaacagtttccactttggtaaaatcagcagacttttgaacgctattaaacatggcattaatggcaataactaaaaatgtaaaatatttttctatgttaggaatatggtttttcactttaatagatatatggtttttggccaaaatgatagatatttttttatccgaggatagtaaaatattattagtcgccgtctctataaaaatgaagctagtctcgatatccaattttattctagaattgataggagtcgccaaatgtaccttatacgttatatctcccttgatgcgttccatttgtgtatctatatcggacacaagatctgtaaatagttttacgttattaatcatcacggtatcgccgtcgctagataacgctaatgtaccatccaagtcccaaatggagagatttaactgttcatcgtttagaataaaatgattaccggtcatattaataaagtgttcatcgtatctagataacaacgacttataattaatgtccaagtcttgaactcgctgaatgatcttttttaacccagttagttttagattggtacgaaatatattgttaaactttgattctacagtaatgtccaaatctagttgtggaaatacttccatcaacattgtttcaaacttgataatattattatctacatcttcgtacgatccaaattccggaatagatgtatcgcacgctctggccacccagataaccaaaaagtcacacgctccaggatatacattgtataaaaagctatcgttttttagtagggtttttttctgcgtgtatacgaagggattaaaaatagtattatcaacgtaactatattccaaattattcttatgagaatagataataatatcgtccttaatatctaacaaatttcctaaatatccctttaattgagtcattcgaagcgtcaatagaatatgtctcttaactatttccggctgttgtatatttaaatgacttcgtaaaaaataatatatgggcgacttctcatctatgtaatcatatggagtgagatatagggctcgttctacctcctgccccttacccacctgtaataccaattgcggacttactatatatcgcatatttatatcgtggggtaaagtgaaaatctactaccgatgatgtaagtcttacaatgttcgaaccagtaccagatcttaatttggaggcctccgtagaactaggggaggtaaatatagatcaaacaacacctatgataaaggagaatagcggttttatatcccgcagtagacgtctattcgcccatagatctaaggatgatgagagaaaactagcactacgattctttttacaaagactttattttttagatcatagagagattcattatttgttcagatgcgttgacgctgtaaaagacgtcactattaccaaaaaaaataacattatcgtggcgccttatatagcacttttaactatcgcatcaaaaggatgcaaacttacagaaacaatgattgaagcattctttccagaactatataatgaacatagtaagaaatttaaattcaactctcaagtatccatcatccaagaaaaactcggataccagtttggaaactatcacgtttatgattttgaaccgtattactctacagtagctctggctattcgagatgaacattcatctggcatttttaatatccgtcaagagagttatctggtaagttcattatctgaaataacatatagattttatctaattaatctaaaatctgatcttgttcaatggagtgctagtacgggcgctgtaattaatcaaatggtaaatactgtattgattacagtgtatgaaaagttacaactggtcatagaaaatgattcacaatttacatgttcattggctgtggaatcaaaacttccaataaaattacttaaagatagaaatgaattatttacaaaattcattaacgagttaaaaaagaccagttcattcaagataagcaaacgcgataaggatacgctactaaaatattttacttaggactggagttagaatttatagacgactcatttcgtttatcattgttactattattactattactatcattattagtgttggcattattagtattcttcttgtcatcttgttcagaaatatacagcaatgctatacctaatactaaatacattatcatgctcgcaatggctctaacaacaacgaaccaaaatgaatttggtcgtagcttttgttcacaaaaatacataaagaaatgtctacataaatctatggcgccattggctacttgaaatagcgccagtcctcctacagattttaatatagctgtataacatgacatttattcatcatcaaaagagacagagtcaccatctgtcatatttagattttttttcatgtgttcaaagtatcctctactcatttcattataatagtttatcatacttagaattttaggacggatcaatgagtaagacttgactagatcgtcagtagtaatttgtgcatcgtctattctgcatccgcttcgtcgaataatgtatagcatcgctttgagattctccatagctatcaagtctttatacaatgacatggaaatatctgtgaatactttatacttctccaacatcgatgccttaacatcatcgcctactttagcattgaaaatacgttctattgtgtagatggatgtagcaagatttttaaacaacaatgccatcttacacgatgattgcctcaagtctccaatcgtttgtttagaacgattagctacagagtccaatgcttggctgactagcatattattatctttagaaattgtattcttcaatgaggcgtttatcatatctgtgatttcgttagtcatattacagtctgactgggttgtaatgttatccaacatatcacctatggatacggtacacgtaccagcatttgtaataatcctatctaagatgttgtatggcattgcgcagaaaatatcttctcctgtaatatctccactctcgataaatctactcagattattcttaaatgccttattctctggagaaaagatatcagtgtccatcatttcattaatagtatacgcagaaaagataccacgagtatcaattctatccaagatacttatcggttccgagtcacagataatggtttcctctccttcgggagatcctgcatagaaatatctaggacaatagtttctatactgtctgtaactctgataatctctaaagtcactaactgataccatgaaattgagaagatcaaacgctgaagtaattaatttttctgcctcgtttttactacaactagttttcatcaatgtagtgacgatgtattgtttagttacttttggtctaatactgatgatagagatattattgcttcccataatggatcttctagtagtcaccttaaagcccattgatgcgaatagcagatagataaagtcttggtatgactcctttctaatatagtacggactacctttgtcacccaactttatacccacataagccataacaacctctttaatagccgtttcatgaggtttatcagccatgagcctgagtagttggaagaatctcatgaatcccgtctcagaaagtcctatatgcatgatagatttatctttcctgggaaactctcgtatagtcatagatgaaatactctttaaagtttctgaaataagattagtaacagtcttacctccgactactctaggtaacaaacaaactctaataggtgttttctctgcggagataatatcagaaaggatagagcaataagtagtattattgtgattataaagaccgaatacataacaggtagaatttataaacatcatgtcctgaaggtttttagacttgtattcctcgtaatccataccgtcccaaaacatggatttggtaactttgatagccgtagatctttgttccttcgccaacaggttaaagaaattaataaagaatttgttgtttctatttatgtccacaaattgcacgtttggaagcgccacggttacattcactgcagcattttgaggatcgcgagtatgaagtacgatgttattgtttactggtatatctggaaagaaatctaccagtctaggaataagagattgatatcgcatagaaatagtaaagtttataatctcatcatcgaagagcattttgttaccattgtaataaatatccactctgtcatatgtataaatgaagtactgttcaaacatgatgagatgtttatatgttggcatagtagtgagatcgacgtttggtaatggcaatgtattaagattaactccataatgtctagcagcatctgcgatgttataagcgtcgtcaaagcggggtcgatcttgtattgttatatattgtctaacacctataagattatcaaaatcttgtctgcttaatacaccgttaacaatttttgccttgaattcttttattggtgcattaataacatccttatagaggatgttaaacaaataagtgttatcaaagttaagatctggatatttcttttctgctagaacatccattgagtcggagccatctggtttaatataaccaccgataaatctagctctgtattctgtatccgtcaatctaatattaagaaggtgttgagtgaaaggtggaagatcgtaaaagctgtgagtattaatgataggattagtttccgaactaatgttaattggggtattaataatatctatatttccagcgttaagtgtaacattaaacagttttaattcacgtgacgtggtatcaattaaataattaatgcccaatttggatatagcagcctgaagctcatcttgtttagttacggatcctaatgagttattaagcaatatatcgaacggatgaacgaaggttgttttaagttggtcacatactttgtaatctagacatagatgcggaagaacggtagaaactatacgaaataaatattcagagtcctctaattgatcaagagtaactattgacttaataggcatcatttatttagtattaaatgacgaccgtaccagtgacggatatacaaaacgatttaattacagagttttcagaagataattatccatctaacaaaaattatgaaataactcttcgtcaaatgtctattctaactcacgttaacaacgtggtagatagagaacataatgccgccgtagtgtcatctccagaggaaatatcctcacaacttaatgaagatctatttccagatgatgattcaccggccactattatcgaacgagtacaacctcatactactattattgacgatactccacctcctacgtttcgtagagagttattaatatcggaacaacgtcaacaacgagaaaaaagatttaatattacagtatcgaaaaatgctgaagcaataatggaatctagatctatgataacttctatgccaacacaaacaccatccttgggagtagtttatgataaagataaaagaattcagatgttagaggatgaagtggttaatcttagaaatcaacgatctaatacaaaatcatctgataatttagataattttaccaaaatactatttggtaagactccgtacaaatcaacagaagttaataagcgtatagccatcgttaattatgcaaatttgaacgggtcccccttatcagtcgaggacttggatgtttgttcggaggatgaaatagatagaatctataaaacgattaaacaatatcacgaaagtagaaaacgaaaaattatcgtcactaacgtgattattattgtcataaacattatcgagcaggcattgctaaaactcggatttgaagaaatcaaaggactgagtaccgatatcacttcagaaattatcgatgtggagatcggagatgactgcgatgctgtagcatctaaactaggaatcggtaacagtccggttcttaatattgtattgtttatactcaagatattcgttaaacgaattaaaattatttaatttaatacattcccatatccagacaacaatcgtctggattaatctgttcctgtcgtctcataccggacgacatattaatctttttattagtgggcatctttttagatggtttctttttcccagcattaactgagtcgatacctagaagatcgtgattgatctctccgaccattccacgaacttctaattggccgtctctgacggtaccataaactattttaccagcattagtaacagcttggacaatctgaccatccatcgcattgtacgatgtagtagtaactgttgttctacgtctaggagcaccagaagtatttttggagcccttggatgttgatgtagaagaagacgaggattttgattttggtttacatgtaatacattttgaactctttgattttgtatcacatgcgccggcagtcacatctgtttgagaattaagattattgttgcctcctttgacggctgcatctccaccgatttgcgctagtagatttttaagctgtggtgtaatcttattaactgtttcgatataatcatcgtaactgcttctaacggctaaattttttttatccgccatttagaagctaaaaatatttttatttatgcagaagatttaactagattatacaatgaactaatatgatccttttccagattatttacaaacttggtattttttggttctggaggaggcgaatttaaattcggacttggattcggattttgtaagttcttgatcttattatacatcgagtataggatggcgacagtaactgctacacaaataccgatcaaaagaagaataccaatcatttattgacaataacttcactattgatcaagtatgcaatatatcatcttttcactaaataagtagtaataatgattcaacaatgtcgagatatatggacgataataatttagttcatggaaatatcgctatgattggtgtgaatgactccgctaactctgtggggtgcgcagtgctttccccacatagaataaattagcattccgactgtgataataataccaagtataaacgccataatactcaatactttccatgtacgagtgggactggtagacttactaaagtcaataaaggcgaagatacacgaaagaatcaaaagaatgattccagcgattagcacgccggaaaaataatttccaatcataagcatcatgtccatttaactaataaaaattttaaatcgccgaatgaacaaagtggaatataaaccatataaaaacaatagtttgtactgcaaaaataatatctatttttgttttcgaagatatggtaaaattaaatagtagtacacagcatgttataactaacagcagcaacggctcgtaattacttatcatttactagacgaaaaggtggtgggatattttcttgctcaaataatacgaatatatcacccatccattttatgcgatgtttatatactctaatctttaatagatctatagacgacgggtttaccaacaatatagattttatcgattcatctaatttaaacccttccttaaacgtgaatgatctattatctggcataacgatgaccctacctgatgaatcggacaatgtactgggccatgtagaataaattatcaacgaattatcgtctacgaacatttatatcatttgttttaattttaggacgcgaataaatggatataaaatagaaaataacagatattacaaccagtgttatggccgcgcccaaccaggtaggcagttttattttatcttttactacaggttctcctggatgtacgtcaccaacggcggacgtagttctagtacaattagacgtaagttccgcttgggaattttttaacgctaaagagttaacgttaatcgtgcacccaacgtatttacatctagttcgttgaacatcttgattataatataaccattttctatctctagattcgtcagtgcactcatgtaaccaacataccctaggtcctaaatatttatctccggaattagattttggataattcgcgcaccaacaatttctatttcctttatgatcgttacaaaagacgtataatgccgtatccccaaaagtaaaataatcaggacgaataattctaataaactcagaacaatatctcgcatccatatgtttggagcaaatatcggaataagtagacatagccggtttccgttttgcacgtaaccattctaaacaattggggtttccaggatcgtttctacaaaatccagtcatgaaatcgtcacaatgttctgtcttgtaattattattaaatatttttggacagtgtttggtatttgtcttagaacaacattttgccacgctatcactatcgcccaggagataatccttttttataaaatgacatcgttgcccggatgctatataatcagtagcgtgttttaaatccttaatatattcaggagttacctcgttctgataatagattaatgatccaggacgaaatttgaaagaactacatggttctccatgaattaatacatattgtttagcaaattcaggaactataaaactactacaatgatctatcgacataccatctatcaaacaaaacttgggtttaatttctcccggagatgtttcataatagtacgtataactttcttctgcaaacttaacagctctattatattcaggataattaaaacctaattccatatatttgtctcgtatatctgctattcctggtgctattttgattctattaagagtaacagctgcccccattcttaataatcgtcagtatttaaactgttaaatgttggtatatcaacatctaccttatttcccgcagtataaggtttgttgcaggtatactgttcaggaatggttacatttatacttcttctatagtcctgtctttcgatgttcatcacatatgcaaagaacagaataaacaaaataatgtaagaaataatattaaatatctgtgaattcgtaaatacattgattgccataataattacagcagctacaatacacacaatagacattcccacagtgttgccattacctccacgatacatttgagttactaagcaataggtaataactaagctagtaagaggcaatagaaaagatgagataaatatcatcaatatagagattagaggagggctatatagagccaagacgaacaaaatcaaaccgagtaacgttctaacatcattatttttgaagattcccaaataatcattcattcctccataatcgttttgcatcatacctccatctttaggcataaacgattgctgctgttcctctgtaaataaatctttatcaagcactccagcacccgcagagaagtcgtcaagcatattgtaatatcttaaataactcatttatatattaaaaaatgtcactattaaagatggagtataatctttatgccgaactaaaaaaaatgacttgtggtcaacccctaagtctttttaacgaagacggggatttcgtagaagttgaaccgggatcatcctttaagtttctgatacctaagggattttacgcctctccttccgtaaagacgagtctagtattcgagacattaacaacgaccgataataaaatcactagtatcaatccaacaaatgcgccaaagttatatcctcttcaacgcaaagtcgtatctgaagtagtttctaatatgaggaaaatgatcgaatcaaaacgtcctctatacatcactcttcacttggcgtgtggatttggtaagactattaccacgtgttatcttatggctacacacggtagaaaaaccgtcatttgcgtacccaataaaatgttaatacatcaatggaagacacaggtagaggcagtcggattggaacataagatatccatagatggagtaagtagtctattaaaggaactaaagactcaaagtccggatgtattaatagtagtcagtagacatctgacaaacgatgccttttgtaaatatatcaataagcattatgatttgttcatcttggatgaatcacatacgtataatctgatgaacaatacagcagttacaagatttttagcgtattatcctccgatgatgtgttattttttaactgctacacctagaccatctaaccgaatttattgtaacagtattattaatattgccaagttatccaatctaaaaaaaactatctatgcagtagatagtttttttgagccatattccacagataatattagacatatggtaaaacgactagatggaccatctaataaatatcatatatataccgagaagttattatctgtagacgagcctagaaatcaacttattcttgataccctggtagaagaattcaagtcaggaactattaatcgcattttagttattactaaactacgtgaacatatggtattattctacaaacgattattagattttttcggaccagaggttgtatttataggagacgcccaaaatagacgtactccagatatggtcaaatcaatcaaggaactaaatagatttatattcgtatccaccttattttattccggtactggtttagatattcctagtttggattcgttgttcatttgctcggcagtaatcaacaatatgcaaatagagcaattactagggagggtatgtcgagaaacagaactattagataggacggtatatgtatttcctaacacatccatcaaagaaataaagtacatgataggaaatttcatgcaacgaattattagtctgtctgtagataaactaggatttaaacaaaaaagttatcggaaacatcaagaatccgatcccacttctgcatgtacaacatcatccagagaagaacgtgtattaaatagaatatttaactcgcaaaatcgttaagaagtttaagcgacgatccgcatgctgcgcaggccagtgtattacccctcatagtattaatataatccaatgatacttttgtgatgtcggaaatcttaaccaatttagactgacaggcagaacacgtcatgcaatcatcatcgtcatcgataactgtagtcttgggcttctttttgcgactcttcattccggaacgcacattggtgctatccatttaggtagtaaaaaataagtcagaatatgccctataacacgatcgtgcaaaacctggtatatcgtctctatctttatcacaatatagtgtatcgacatttttattattattgacctcgtttatcttggaacatggaatgggaacatttttgttatcaacggccatctttgccttaattccagatgttgtaaaattataactaaacagtctatcatcgacacaaatgaaattcttgtttagacgtttgtagtttacgtatgcggctcgttcgcgtctcattttttcagatattgcaggtactataatattaaaaataagaatgaaataacataggattaaaaataaagttatcatgacttctagcgctgatttaactaacttaaaagaattacttagtctgtacaaaagtttgagattttcagattctgcggctatagaaaagtataattctttggtagaatggggaacatctacttactggaaaataggcgtgcaaaaggtagctaatgtcgagacgtcaatatctgattattatgatgaggtaaaaaataaaccgtttaatattgatccgggctattacattttcttaccggtatattttgggagcgtctttatttattcgaagggtaaaaatatggtagaacttggatctggaaactcttttcaaataccagatgatatgcgaagtgcgtgtaacaaagtattagacagcgataacggaatagactttctgagatttgttttgttaaacaatagatggataatggaagatgctatatcaaaatatcagtctccagttaatatatttaaactagctagtgagtacggattaaacatacccaaatatttagaaattgaaatagaggaagacacattatttgacgacgagttatactctattatagaacgctctttcgatgataaatttccaaaaatatccatatcgtatattaagttgggagaacttagacggcaagttgtagactttttcaaattctcattcatgtatattgagtccatcaaggtagatcgtataggagataatatttttattcctagcgttataacaaaatcaggaaaaaagatattagtaaaagatgtagaccatttaatacgatccaaggttagagaacatacatttgtaaaagtaaaaaagaaaaacacattttccattttatacgactatgatggaaacggaacagaaactagaggagaagtaataaaacgaattatagacactataggacgagactattatgttaacggaaagtatttctctaaggttggtagtgcaggcttaaagcaattgactaataaattagatattaatgagtgcgcaactgtcgatgagttagttgatgagattaataaatccggaactgtaaaacgaaaaataaaaaaccaatcagcatttgatttaagcagagaatgtttgggatatccagaagcggattttataacgttagttaataacatgcggttcaaaatagaaaattgtaaggttgtaaatttcaatattgaaaatactaattgtttaaataacccgagtattgaaactatatatggaaactttaaccagttcgtctcaatctttaatgtcgtcaccgatgtcaaaaaaagattattcgagtgaaataatatgcgcctttgatataggtgcaaaaaatcctgccagaactgttttagaagtcaaggataactccgttagggtattggatatatcaaaattagactggagttctgattgggaaaggcgcatagctaaagatttgtcacaatatgaatacactacagttcttctagaacgtcagcctagaaggtcgccgtatgttaaatttatctattttattaaaggctttttatatcatacatcggctgccaaagttatttgcgtctcgcctgtcatgtctggtaattcatatagagatcgaaaaaagagatcggtcgaagcatttcttgattggatggacacattcggattgcgagactccgttccggatagacgcaaattagacgatgtagcggatagtttcaatttggctatgagatacgtattagataaatggaatactaattatacaccttataataggtgtaaatctagaaattacataaaaaaaatgtaataacgttagtaacgccattatggataatctatttacctttctacatgaaatagaagatagatatgccagaactatttttaactttcatctaataagttgcgatgaaataggagatatatatggtcttatgaaagaacgcatttcctcagaggatatgtttgataatatagtgtataataaagatatacatcctgccattaagaaactagtgtattgcgacatccaacttactaaacacattattaatcagaatacgtatccggtatttaacgattcttcacaagtgaaatgttgtcattatttcgacataaactcagataatagcaatattagctctcgtacagtagagatatttgagagggaaaagtcatctcttgtatcatatattaaaactaccaataagaagagaaaggtcaattacggcgaaataaagaaaactgttcatggaggcactaatgcaaattacttttccggtaaaaagtctgacgagtatctgagtactacagttagatccaacattaatcaaccttggatcaaaaccatctctaagaggatgagagttgatatcattaatcactctatagtaacgcgtggaaaaagctctatattacaaactatagaaattatttttactaatagaacatgtgtgaaaatattcaaggattctactatgcacattattctatccaaggacaaggatgaaaaggggtgtatacacatgattgacaaattattctatgtctattataatttatttctgttgttcgaagatatcatccaaaacgagtactttaaagaagtagctaatgttgtaaaccacgtactcacggctacggcattagatgagaaattattcctaattaagaaaatggctgaacacgatgtttatggagttagcaatttcaaaatagggatgtttaacctgacatttattaagtcgttggatcataccgttttcccctctctgttagatgaggatagcaaaataaagttttttaaggggaaaaagctcaatattgtagcattacgatctctggaggattgtataaattacgtgactaaatccgagaatatgatagaaatgatgaaggaaagatcgactattttaaatagcatagatatagaaacggaatcggtagatcgtctaaaagaattgcttctaaaatgaaaaaaaacactaattcagaaatggatcaacgactagggtataagtttttggtgcctgatcctaaagccggagttttttatagaccgttacatttccaatatgtatcgtattctaattttatattgcatcgattgcatgaaatcttgaccgtcaagcggccactcttatcgtttaagaataatacagaacgaattatgatagaaattagcaatgttaaagtgactcctccagattactcacctataatcgcgagtattaaaggtaagagttatgacgcattagccacgttcactgtaaatatctttaaagaggtaatgaccaaagagggtatatccatcactaaaataagtagttatgagggaaaagattctcatttgataaaaattccgctactaataggatacgggaataaaaatccacttgatacagccaagtatcttgttcctaatgtcataggtggagtctttatcaataaacaatctgtcgaaaaagtaggaattaatctagtagaaaagattacaacatggccaaaatttagggttgttaagccaaactcattcactttctcgttttcctccgtatcccctcctaatgtattaccgacaagatatcgccattacaagatatctctggatatatcacaattggaagcgttgaatatatcatcgacaaagacatttataacggtcaatattgttttgctgtctcaatatttatctagagtgagtctagaattcattagacgtagtttatcatacgatatgcctccagaagttgtctatctagtaaacgcgataatagatagtgctaaacgaattactgaatctattactgactttaatattgatacatacattaatgacctggtggaagctgaacacattaaacaaaaatctcagttaacgatcaacgagttcaaatatgaaatgctgcataactttttacctcatatgaactatacacccgatcaactaaagggattttatatgatatctttactaagaaagtttctctactgtatcttccacacttctagatatccagatagagattcgatggtttgtcatcgcatcctaacgtacggcaaatattttgagacgttggcacatgatgaattagagaattacataggcaacatccgaaacgatatcatgaacaatcacaagaacagaggcacttacgcggtaaacattcatgtactaacaactcccggacttaatcacgcgttttctagcttattgagtggaaagttcaaaaagtcagacggtagttatcgaacacatcctcactattcatggatgcagaatatttctattcctaggagtgttggattttatccggatcaagtaaagatttcaaagatgttttctgtcagaaaataccatccaagtcaatatctttacttttgttcatcagacgttccggaaagaggtcctcaggtaggtttagtatctcaattgtctgtcttgagttccattacaaatatactaacgtctgagtatttggatttggaaaagaaaatttgtgagtatatcagatcatattataaagatgatataagttactttgaaacaggatttccaatcactatagaaaatgctctagtcgcatctcttaatccaaatatgatatgtgattttgtaactgactttagacgtagaaaacggatgggattcttcggtaacttggaggtaggtattactttagttagggatcacatgaatgaaattcgcattaatattggagcgggaagattagtcagaccattcttggttgtggataacggagagctcatgatggatgtgtgtccggagttagaaagcagattagacgacatgacattctctgacattcagaaagagtttccgcatgtcatcgaaatggtagatatagaacaatttacttttagtaacgtatgtgaatcggttcaaaaatttagaatgatgtcaaaggatgaaagaaagcaatacgatttatgtgactttcctgccgaatttagagatggatatgtagcatcttcattagtgggaatcaatcacaattctggacccagagctattcttggatgtgctcaagctaaacaagctatctcttgtctgagctcggatatacgaaataaaatagacaatggaattcatttgatgtatccagagaggccaatcgtgattagtaaggctttagaaacttcaaagattgcggctaattgcttcggccaacatgttactatagcattaatgtcgtacaaaggtatcaatcaagaggatggaattatcatcaaaaaacaatttattcagagaggcggtctcgatattgttacagccaagaaacatcaagtagaaattccattggaaaactttaataacaaagaaagagataggtctaacgcctattcaaaattagaaagtaatggattagttagactgaatgctttcttggaatccggagacgctatggcacgaaatatctcatcaagaactcttgaagatgattttgctagagataatcagattagcttcgatgtttccgagaaatataccgatatgtacaaatctcgcgttgaacgagtacaagtagaacttactgacaaagttaaggtacgagtattaaccatgaaagaaagaagacccattctaggagacaaatttaccactagaacgagtcaaaagggaacagtcgcgtatgtcgcggatgaaacggaacttccatacgacgaaaatggtatcacaccagatgtcattattaattctacatccatcttctctagaaaaactatatctatgttgatagaagttattttaacagccgcatattctgctaagccgtacaacaataagggagaaaaccgacctgtctgttttcctagtagtaacgaaacatccatcgatacatatatgcaattcgctaaacaatgttatgagcattcaaatccgaaattgtccgatgaagaattatcggataaaatcttttgtgaaaagattctctatgatcctgaaacggataagccttatgcatccaaagtattttttggaccaatttattacttgcgtctgaggcatttaactcaggacaaggcaaccgttagatgtagaggtaaaaagacgaagctcattagacaggcgaatgagggacgaaaacgtggaggaggtatcaagttcggagaaatggagagagactgtttaatagcgcatggtgcagccaatactattacagaagttttgaaagattcggaagaagattatcaagatgtgtatgtttgtgaaaattgtggagacatagcagcacaaatcaagggtattaatacatgtcttagatgttcaaaacttaatctctctcctctcttaacaaaaattgataccacgcacgtatctaaagtatttcttactcaaatgaacgccagaggcgtaaaagtcaaattagatttcgaacgaaggcctccttcgttttataaaccattagataaagttgatctcaagccgtcttttctggtgtaatattctagtttggtagtagatacatatcaatatcatcaaattcgagatccgaattataaaatgggcgtggattgttaactatagaatcggacgtctgatattcgaaaatctgtggagtttcaggttttggtggaggtgtaactgctacttgggatactgaagtctgatattcagaaagctgtggatgttctggttcggcatccaccgatggtgtcacatcactaatcggttcggtaacgtctgtggatggaggtgctacttctacagaacctgtagcctcagttgtcaacggagatacatttttaatgcgagaaaatgtataatttggtaatggtttcttatgtggatctgaagaagaggtaagatatctactagaaagataccgatcacgttctagttctcttttgtagaacttaactttttctttctccgcatctagttgatattccaacctcttcacgttactacgttcagattccaattcacgttcgcatgggttacctccgcagtttttacgagcgatttcacgttcagccttcatgcgtctctccctctctctatcgagtttatcagagcagtctttctgaaggcgatcgaactccataaatttctccaacgctttgattgtttccatagatttccgaagttcagcttttaggactgtgattctttttctttcgaattcacagctggatgtacaaccgtttccattaccgccatctctaagtttcttttctagatcggcaacatttcatccccatgccttttacattcctcgagtctactgtcgtcgaaatatcgttccagctccttttcgacatcaataactttagcacgttgtctctcaagctctcttttgtagttatctgattccctggcacgtttaagatcttcatgcaattgagtcagctcttaacttcctctcttgcttcttcgtcatagtacgcgcaatcactgtgagatccattgttaccacgtctacactcggcgagctcgcgtttaagagattcaatttcccgtttgtattggtccatgtttccattgctaccaccattagatttacaggctgctagttgtcgttcgagatcagaaatacgggttttcttggaattgatttcgtcgatgtacttggcatcgaaacacttattaagttctttttccaattctacgattttatttctttcgcgagtcaattccctcctgtagtaactatctgttttgtcagattcacgctctctacgtagactttcttgcaagttactaatttgttccctagcacgtccgagtttagttttatatgctgaatagagttctgattcatcctttgagcagatctctagcgatcgtttaagattcctaattctagtctttagcctatttacctcctcagaagatgttccgttaccgttgcgtttacactcgttaagctgtctatcaagatccatgattctatctctaagacgttgcatctctctttccatatcagcattgctttcattattacgtctgcagtcactcaactgtctttcaatatctgagattctatctctaagacgtcgcatctctctctgtttcggcattggtttcattattacgtttacagtcgttcaactgtctttcaagatctgatattctagattggagtctgctaatctctgtagcattttcacggcattcactcagttgtctttcaagatctgaaattttagattggagtctgctaatctctgtaagatttcctcctccgctctcgatgcagtcggtcaacttattctctagttctctaatacgcgaacgcagtgcatcaacttcttgcgtgtcttcctggttgcgtgtacattcatcgagatctctaacgcgtcgtcgttcttcctcaagttctctgcgtactacagaaagcgtgtccctatcttgttgatatttagcaatttctgattctagagtactgattttgcttacgtagttactaatagttgtcttggccttatcaagatcctccttgtatttgtcgcattccttgatatccctacgaagtctggacagttcccattcgacattacgacgtttatcgatttcagctcggagatcgtcatcgcgttgttttagccacatacgactgagttcaagttctcgttgacaagatccatctacttttccattcctaatagtatccagttccttttctagttctgaacgcatttctcgttccctatcaagcgattctctcaattctcggatagtcttcttatcaatttctaataaatctgaaccatcatctgtcccattttgaatatccctgtgttctttgatctcttttgtaagtcggtcgattctttcggttttataaacagaatccctttccaaagtcctaatcttactgagtttatcactaagttctgcattcaattcggtgagttttctcttggcttcttccaactctgttttaaactctccactatttccgcattcttcctcgcatttatctaaccattcaattagtttattaataactagttggtaatcagcgattcctatagccgttcttgtaattgtgggaacataattaggatcttctaatggattgtatggcttgatagcatcatctttatcattattagggggatggacaaccttaattggttggtcctcatctcctccagtagcgtgtggttcttcaataccagtgttagtaataggcttaggcaaatgcttgtcgtacgcgggcacttcctcatccatcaagtatttataatcgggttctacttcagaatattcttttctaagagacgcgacttcgggagttagtagaagaactctgtttctgtatctatcaacgctggaatcaatactcaagttaaggatagcgaatacctcatcgtcatcatccgtatcttctgaaacaccatcatatgacatttcatgaagtctaacgtattgataaatagaatcagatttagtattaaacagatccttaacctttttagtaaacgcatatgtatattttagatctccagatttcataatatgatcacatgccttaaatgtcagtgcttccatgatataatctggaacactaatgggtgacgaaaaagatacagcaccatatgctacgttgataaataaatctgaaccactaagtagataatgattaatgttaagaaagaggaaatattcagtgtataggtatgtcttggcgtcatatcttgtactaaacacgctaaacagtttgttaatgtgatcaatttccaatagattaattagagcagcgggaataccaacaaacatattaccacatccgtattttctatgaatatcacatatcatgttaaaaaatcttgatagaagagcgaatatctcgtctgacttaatgagtcgtagttcagcagcaacataagtcataactgtaaatagaacatactttcctgtagtgttgattctagactccacatcaacaccattattaaaaatagttttatatacatctttaatctgctctccgttaatcgtcgaacgttctagtatacggaaacactttgatttcttatctgtagttaatgacttagtgatatcacgaagaatattacgaattacatttcttgtttttcttgagagacctgattcagaactcaactcatcgttccatagtttttctacctcagtggcgaaatctttggagtgcttggtacatttttcaataaggttcgtgacctccatttattataaaaaatttattcaaaacttaactacaatcgggtaattataagatcgtagatctcccatgtggcggaatactaccatctatcgcatgtggatggacagtaggtaatggccatgggaacagtaatgtttgcatatttatctttcttgctagtattactgcatattgtcccaatgtttcgatgtgatgttctaacctatcaactgccgctgtatcacaacaatagtgtccgatgaaattaagattatgatccaatgtgtttaatatatgattatcaagtcttatacgatccgcgtcttttttgacaggatcaggttcttctacaggaagaagtttcggcctcttatgatattcatgtctgggaaacggtggtctagggtgaggctccggtatcggagtgggttttggattataatcatcatcgtctatgacatcatcttcgacttcgatatttattttgctatcttgatgatgtcctgtatcagttgcattttcagcactcgactgaatattagcgcattcattgtctattattaccatatttctaaacccaaaatgtatgtgttgaacatcagtactatcgttgatgagtcttatagcatgaattcgcttatcgttatcgggtttatcttctgtcaccttagcaattccttttttattaaactctacataatcatatccatttctattgtttgttctaatataaacgagtatagcatcattgctaaatttttcaatagtatcaaaaacagaatatcctaaaccatataatatatattcaggaacactcaaactaaatgtccaggattctcctaaatacgtaaactttaatagtgcgaaatcattcaaaaatctaccacttatagatagatagtacataaatgcgtatagtagtctacctatctctttattatgaaaaccggcattacgatcatatatgtcgtgatatacctgtgatccgtttacgttaaaccataaatacatgggtgatcctataaacatgaatttatttctaattctcagagctatagttaattgaccgtgtaatatttgcttacatgcatacttgatacgcttattaataagatttttatcattgctcgttatttcagaatcgtatatataaggagtaccatcgtgattcttaccagatattatacaaaatactatatataaaatatattgacccacgttagtaatcatataaatgtttaacgttttaaattttgtattcaatgatccattatcatacgctatcatggtcttgtaatattcattctttaaaatataatattgtgttagccattgcattggagctcctaatggagattttctattctcatccattttaggataggctttcataaagtccctaataacttcgtgaataatgtttctatgttttctactgatgcatgtatttgcttcgatttttttatcccatgtttcatctatcatagatttaaacgcagtaatgctcgcaacattaacatcttgaaccgttggtacaattccgttccataaatttataatgttcgccatttatataactcattttttgaatatacttttaattaacaaaagagttaagttactcatatggacgccgtccagtctgaacatcaatctttttagccagagatatcatagccgctcttagagtttcagcgtgattttccaacctaaatagaacttcatcgttgcgtttacaacacttttctatttgttcaaactttgttgttacattagtaatctttttttccaaattagttagccgttgtttgagagtttcctcattgtcgtcttcatcggctttaacaattgcttcgcgtttagcctctggctttttagcagcctttgtagaaaaaaattcagttgctggaattgcaagatcgtcatctccggggaaaagagttccgtccatttaaagtacagattttagaaactgacactctgcgttatttatatttggtacaacacatggattataaatattgatgttaataacatcagaaaatgtaaagtctatacattgttgcatcgtgttaaattttctaatggatctagtattattgggtccaacttctgcctgaaatccaaatatggaagcggatacaaaaccgtttcctggataaaccacacatctccacttttgctttacatcagaaattgtgtcgttgacatcttgaactctcctatctaatgccggtgttccacctatagattttgaatattcgaatgctgcatgagtagcattaaattccttaatattgccataattttcatatattgagtaaccctggataaaaagtaaacacaccgcagccgtcgctaccacaataaaaaaaattgatagagagttcatttataatctattagaagctgacaaaatttttttacacgcatcagacaatgctttaataaatagttcaacatctacttttgtcatatcgaaccgatggtatgattctaacctagaattacatccgaaaaagttgactatgttcatagtcattaagtcattaacaaacaacattccagactctggattataagacgatactgtttcgtcacaattacctaccttaatcatgtgattatgaatattggctattagagcaccttctaagaaatctataatatctttgaaacacgatttaaaatcaaaccacgaatatacttctacgaagaaagttagtttacccataggagaaataactataaatggagatctaaatacaaaatccggatctatgatagttttaacattattatattctctattaaatacctccacatctaaaaatgttaattttgaaactatgtcttcgtttattaccgtacctgaactaaacgctataagctctattgtttgagaactctttaaacgatattcttgaaatacatgtaacaaagtttcctttaactcggtcggtttatctaccatagttacagaatttgtatccttatctataatataataatcaaaatcgtataaagttatataattatcgcgttcagattgtgatcttttcaaatagactaaaaaccccatttctctagtaagtatcttatgtatatgtttgtaaaatatcttcatggtgggaatatgctctaccgcagttagccattcctcattgacagcggtagatgtattagacaaaactattccaatgtttaacaagggccattttacgagattattaaatccttgtttgataaatgtagccaatgagggttcgagttcaacgacgattgaattctcttcccgcggatgctgcatgatgaacgacgggatgttgttcgattgatttggaattctttttcgactttttgtttatattaaatattttaaaatttatagcggatagcaattcatgtaccacggataatgtagacgcgtattgcgcatcgatatctttattattagataaatttatcaataaatgtgagaagtttgcctcgttaaggtcttccatttaaatattatataaacatttgtgtttgtatcttattcgtcttttatggaatagttttttactagtaaagctgcaattacacactttgtccgtaaaacataaatataaacaccagcttttatcaatcgttccaaaaagtcgacggcggacatttttaacatggcatctattttaaatacacttaggtttttggaaaaaacatcattttataattgtaacgattcaataactaaagaaaagattaagattaaacataagggaatgtcatttgtattttataagccaaagcattctaccgttgttaaatacttgtctggaggaggtatatatcatgatgatttggttgtattggggaaggtaacaattaataatctaaagatgatgctattttacatggatttatcatatcatggagtgacaagtagtggagcaatttacaaattgggatcgtctatcgatagactttctctaaataggactattgttacaaaagttaataattatgatgatacattttttgacgacgatgattgatcgctattgcacaattttgtttttgtactttctaatatagtgtttaggttctttttcatatgagaatattgatttactaaaatatctatgtttaacttttgttctatgacgtccttatcggcggtatcggtacatatacgtaattcaccttcacaaaatacggagtcttcgataataatagccaatcgattattggatctagctgtctgtatcatattcaacatgtttaatatatcctttcgtttcccctttacaggcatcgatcgtagcatattttccgcgtctgatatggaaatgttaaaactacaaaaatgcgtaatgttagcccgtcctaatattggtacgtgtctataagtttggcatagtagaataatagacgtgtttaaatgccttccaaagtttaagaattctattagagtattgcattttgatagtttatcgcctacatcatcaaaaataagtaaaaagtgtgctgattttttatgattttgtgcgacagcaatacatttttctatgttacttttagttcgtatcagattatattctagagattcctgactactaacgaaattaatatgatttggccaaatgtatccatcataatctgggttataaacgggtgtaaacaagaatatatgtttatattttttaactagtgtagaaaacagagatagtaaatagatagtttttccagatccagatcctcctgttaaaaccattctaaacggcatttttaataaattttctcttgaaaattgtttttcttggaaacaattcataattatatttacagttactaaattaatttgataataaatcaaaatatggaaaactaaggttgttagtagggaggagaacaaagaaggcacatcgtgatataaataacatttattatcatgatgacaccagaaaacgacgaagagcagacatctgtgttctccgctactgtttacggagacaaaattcagggaaagaataaacgcaaacgcgtgattggtctatgtattagaatatctatggttatttcactactatctatgattaccatgtccgcgtttctcatagtgcgcctaaatcaatgcatgtctgctaacgaggctgctattactgacgccgctgttgccgttgctgctgcatcatctactcatagaaaggttgcgtctagcactacacaatatgatcacaaagaaagctgtaatggtttatattaccagggttcttgttatatattacattcagactaccagttattctcggatgctaaagcaaattgcactgcggaatcatcaacactacccaataaatccgatgtcttgactacctggctcattgattatgttgaggatacatggggatctgatggtaatccaattacaaaaactacatccgattatcaagattctgatgtatcacaagaagttagaaagtatttttgtgttaaaacaatgaactaatatttatttttgtacattaataaatgaaatcgcttaatagacaaactgtaagtaggtttaagaagttgtcggtgccggccgctataatgatgatactctcaaccattattagtggcataggaacatttctgcattacaaagaagaactgatgcctagtgcttgcgccaatggatggatacaatacgataaacattgttatttagatactaacattaaaatgtctacagataatgcggtttatcagtgtcgtaaattacgagctagattgcctagacctgatactagacatctgagagtattgtttagtattttttataaagattattgggtaagtttaaaaaagaccaatgataaatggttagatattaataatgataaagatatagatattagtaaattaacaaattttaaacaactaaacagtacgacggatgctgaagcgtgttatatatacaagtctggaaaactggttaaaacagtatgtaaaagtactcaatctgtactatgtgttaaaaaattctacaagtgacaacaaaaaatgaattaataataagtcgttaacgtacgccgccatggacgccgcgtttgttattactccaatgggtgtgttgactataacagatacattgtatgatgatctcgatatctcaatcatggactttataggaccatacattataggtaacataaaaactgtccaaatagatgtacgggatataaaatattccgacatgcaaaaatgctactttagctataagggtaaaatagttcctcaggattctaatgatttggctagattcaacatttatagcatttgtgccgcatacagatcaaaaaataccatcatcatagcatgcgactatgatatcatgttagatatagaagataaacatcagccattttatctattcccatctattgatgtttttaacgctacaatcatagaagcgtataacctgtatacagctggagattatcatctaatcatcaatccttcagataatctgaaaatgaaattgtcgtttaattcttcattctgcatatcagacggcaatggatggatcataattgatgggaaatgcaatagtaattttttatcataaaagttgtaaagtaaataataaaacaataaatattgaactagtagtacgtatattgagcaatcagaaatgatgctggtacctcttatcacggtgaccgtagttgcgggaacaatattagtatgttatatattatatatttgtaggaaaaagatacgtactgtctataatgacaataaaattatcatgacaaaattaaaaaagataaagagttctaattccagcaaatctagtaaatcaactgatagcgaatcagactgggaggatcactgtagtgctatggaacaaaacaatgacgtagataatatttctaggaatgagatattggacgatgatagcttcgctggtagtttaatatgggataacgaatccaatgttatggcgcctagcacagaacacatttacgatagtgttgctggaagcacgctgctaataaataatgatcgtaatgaacagactatttatcagaacactacagtagtaattaatgaaacggagactgttgaagtacttaatgaagataccaaacagaatcctaactattcatccaatcctttcgtaaattataataaaaccagtatttgtagcaagtcaaatccgtttattacagaacttaacaataaatttagtgagaataatccgtttagacgagcacatagcgatgattatcttaataagcaagaacaagatcatgaacacgatgatatagaatcatcggtcgtatcattggtgtgattagtttcctttttataaaattgaagtaatatttagtattattgctgccgtcacgttgtacaaatggagatattccctgtattcggcatttctaaaattagcaattttattgctaataatgactgtagatattatatagatacagaacatcaaaaaattatatctgatgagatcaatagacagatggatgaaacggtacttcttaccaacatcttaagcgtagaagttgtaaatgacaatgagatgtaccatcttattcctcatagattatcgacgattatactctgtattagttctgtcggaggatgtgttatctctatagataatgacatcaatggcaaaaatattctaacctttcccattgatcatgctgtaatcatatccccactgagtaaatgtgtcgtagttagcaagggtcctacaaccatattggttgttaaagcggatatacctagcaaacgattggtaacatcgtttacaaacgacatactatatgtaaacaatctgtcactgattaattatttgccgttgtctgtattcattattagacgagtcaccgactatttggatagacacatatgcgatcagatatttgctaataataagtggtattcccttataaccatcgacgataagcaatatcctattccatcaaactgtataggtatgtcctctgccaagtacataaattctagcatcgagcaagatactttaatccatgtttgtaacctcgagcatccgttcgactcagtatacaaaaaaatgcagtcgtacaattctctacctatcaaggaacaaatattgtacggtagaattgataatataaatatgagcattagtatttctgtggattaatagatttctagtatggggatcattaatcatctctaatctctaaatacctcataaaacgaaaaaaaagctattatcaaatactgtacggaatggattcattctcttctctttttatgaaactctgttgtatatctactgataaaactggaagcaaaaaatctgatagaaagaataagaataagatcaaggattatatggaacacgattattataaaataacaatagttcctggttcctcttccacgtctactagctcgtggtattatacacatgcctagtaatagtctctttgcgttgacggaaagcagactagaaataacaggctaaaatgttcagacaccataatagttcccaacccagataataacagagttccatcaacacattcctttaaactcaatcccaaacccaaaaccgttaaaatgtatccggccaattgatagtagataatgaggtgtacagcgcatgataatttacacagtaaccaaaatgaaaatactttagtaattataagaaatatagacggtaatgtcatcatcaacaatccgataatatgcctgagagtaaacattgacggataaaacaaaaatgctccgcataactctatcatggcaataacacaaccaaatacttgtaagattcctaaattagtagaaaatacaacgaatatcgatgtataagtgatctcgagaaataataagaataaagtaatgcccgtaaagataaacatcaacattgtttggtaatcattaaaccaattagtatgaagttgaactaatttcacagtagattttattccagtgttatcctcgcatgtataagtacctggtaagatatctttatattccataatcaatgagacatcactatctgataacgaatgaagtctagcactagtatgccatttacttaatattgtcgtcttggaagttttattataagttaaaatatcatggttatccaatttccatctaatatactttgtcggattatctatagtacacggaataatgatggtatcattacatgctgtatactctatggtctttgtagttgttataacaaccaacgtatagaggtatatcaacgatattctaactcttgacattttttatttatttaaaatgatacctttgttatttattttattctattttgctaacggtattgaatggcataagtttgaaacgagtgaagaaataatttctacttacttattagacgacgtattatacacgggtgttaatggggcggtatacacattttcaaataataaactaaacaaaactggtttaactaataataattatataacaacatctataaaagtagaggatgcggataaggatacattagtatgcggaaccaataacggaaatcccaaatgttggaaaatagacggttcagacgacccaaaacatagaggtagaggatacgctccttatcaaaatagcaaagtaacgataatcagtcacaacggatgtgtactatctgacataaacatatcaaaagaaggaattaaacgatggagaagatttgacggaccatgtggttatgatttattcacggcggataacgtaattccaaaagatggtttacgaggagcattcgtcgataaagacggtacttatgacaaagtttacattcttttcactgatactatcggctcaaagagaattgtcaaaattccgtatatagcacaaatgtgcctaaacgacgaaggtggtccatcatcattgtctagtcatagatggtcgacgtttctcaaagtcgaattagaatgtgatatcgacggaagaagttatagacaaattattcattctagaactataaaaacagataatgatacgatactatatgtattcttcgatagtccttattccaagtccgcattatgtacctattctatgaataccattaaacaatctttttctacgtcaaaattggaaggatatacaaagcaattgccgtctccagctcctggtatatgtttaccagctggaaaagttgttccacataccacgtttgaagtcatagaacaatataatgtactagatgatattataaagcctttatctaaccaacctatcttcgaaggaccgtctggtgttaaatggttcgatataaaggagaaggaaaatgaacatcgggaatatagaatatacttcataaaagaaaattctatatattcgttcgatacaaaatctaaacaaactcgtagctcgcaagtcgatgcgcgactattttcagtaatggtaactgcgaaaccgttatttatagcagatatagggataggagtaggaatgccacaaatgaaaaaaatacttaaaatgtaatcttaatcgagtacaccacacgacaatgaacaaacataagacagattatgctggttatgcttgctgcgtaatatgcggtctaattgtcggaattatttttacagcgacactattaaaagttgtagaacgtaaattagttcatacaccattaatagataaaacgataaaagatgcatatattagagaagattgtcctactgactggataagctataataataaatgtatccatttatctactgatcgaaaaacctgggaggaaggacgtaatgcatgcaaagctctaaattcaaattcggatctaattaagatagagactccaaacgagttaagttttttaagaagccttagacgaggctattgggtaggagaatccgaaatattaaaccagacaaccccatataattttatagctaagaatgccacgaagaatggaactaaaaaacggaaatatatttgtagcacaacgaatactcccaaactgcattcgtgttacactatataacaattacactacatttttatcataccactacttcggttagatgttttagaaaaaaataaatatcgccgtaccgttcttgtttttataaaaataacaattaacaattatcaaattttttctttaatattttacgtggttgaccattcttggtggtaaaataatctcttagtgttggaatggaatgctgtttaatgtttccacactcatcgtatattttgacgtatgtagtcacatcgtttacgcaatagtcagactgtagttctatcatgcttcctacatcagaaggaggaacagttttaaagtctcttggttttaatctattaccgttagttttcatgaaatcctttgttttatccacttcacattttaaataaatgtccactatacattcttttgttaattttactagatcgtcatgggtcatagaatttataggttccgtagtccatggatccaaactagcaaacttcgcgtatacggtatcgcgattagtgtatacaccaactgtatgaaaattaagaaaacagtttaataaatcaacagaaatatttaatcctccgtttgatacagatgcgccatatttatggatttcggattcacacgttgtttgtctgaggtgttcgtctagtgttgcttctacgtaaacttcgattcccatatattctttattgtcagaatcgcataccgatttatcatcatacactgtttgaaaactaaatggtatacacatcaaaataataaataataacgagtacattctgcaatattgttatcgtaattggaaaaatagtgttcgagtgagttggattatgtgagtattggattgtatattttattttatattttgtaataagaataaaatgctaatgtcaagtttattccaatagatgtcttattaaaaacatatataataaataacaatggctgaatggcataaaattatcgaggatatctcaaaaaataataagttcgaggatgccgccatcgttgattacaagactacaaagaatgttctagctgctattcctaacagaacatttgccaagattaatccgggtgaaattattcctctcatcactaatcgtaatattctaaaacctcttattggtcagaaatattgtattgtatatactaactctctaatggatgagaacacgtatgctatggagttgcttactgggtacgcccctgtatctccgatcgttatagcgagaactcataccgcacttatatttttgatgggtaagccaacaacatccagacgtgacgtgtatagaacgtgtagagatcacgctacccgtgtacgtgcaactggtaattaaaataaaaagtaatattcatatgtagtgtcaattttaaatgatgatgatgaaatggataatatccatattgacgatgtcaataatgccggtattggcatacagttcatcgatttttagatttcattcagaggatgtggaattatgttatgggcatttgtattttgataggatctataatgtagtaaatataaaatataatccgcatattccatatagatataattttattaatcgcacgttaaccgtagatgaactagacgataatgtcttttttacacatggttattttttaaaacacaaatatggttcacttaatcctagtttgattgtctcattatcaggaaacttaaaatataatgatatacaatgctcagtaaatgtatcgtgtctcattaaaaatttggcaacgagtacatctactatattaacatctaaacataagacttattctctacatcggtccacgtgtattactataataggatacgattctattatatggtataaagatataaatgacaagtataatgacatctatgattttactgcaatatgtatgctaatagcgtctacattgatagtgaccatatacgtgtttaaaaaaataaaaatgaactcttaattatgctatgctattagaaatggataaaatcaaaattacggttgattcaaaaattggtaatgttgttaccatatcgtataacttggaaaagataactattgatgtcacacctaaaaagaaaaaagaaaaggatgtattattagcgcaatcagttgctgtcgaagaggcaaaagatgtcaaggtagaagaaaaaaatattatcgatattgaagatgacgatgatatggatgtagaaagcgcgtaatacgatctataaaaataagtatataaatactttttatttactgtactcttactgtgtagtggtgataccctactcgattatttttttaaaaaaaaaatacttattctgattcttctagccatttccgtgttcgtttgaatgccacatcgacgtcaaagataggggagtagttgaaatctagttctgcattgttggtacgcacctcaaatgtagtgttggatatcttcaacgtatagttgttgagtagtgatggttttctaaatagaattctcttcatatcattcttgcacgcgtacatttttagcatccatcttggaatcctagatccttgttctattcccaatggtttcatcaatagaagattaaacatatcgtacgaacacgatggagagtaatcgtagcaaaagtaagcatttcctttaatcttagatcccggatactggatatattttgcagccaacacgtgcatccatgcagcatttcctacatatacccggctatgcaccgcgtcatcatcgactgtacgatacataatgttaccgtgttgcttacattgctcgtaaaagactttcatcaatttgtctccttctccgtaaattccagtgggtcttaggcaacaagtatacaattttgctccattcatgattacggaattattggctttcataaccagttgctcggccatacgtttactttttgcgtatacatgtcctggtgatatatcataaagggtatgctcatggccgatgaatggatcaccgtgtttattgggtcctattgcttccatgctactagtatagatcaaatacttgattcctaggtccacacaagctgccaaaatagtctgtgttccataatagtttactttcatgatttcattatcggtgtattttccaaatacatccactagagcagccgtatgaataatcagatttaccccatctagcgcttctctcaccttatcaaagtcgtttatatcacattgtatatagtttataaccttaactttcgaggttattggttgtggatcttctacaatatctatgactctgatttcttgaacatcatctgcactaattaacagttttactatatacctgcctagaaatccggcaccaccagtaaccgcgtacacggccattgctgccactcataatatcagactacttattctattttactaaataatggctgtttgtataatagaccacgataatatcagaggagttatttactttgaaccagtccatggaaaagataaagttttaggatcagttattggattaaaatccggaacgtatagtttgataattcatcgttacggagatattagtcaaggatgtgattccataggcagtccagaaatatttatcggtaacatctttgtaaacagatatggtgtagcatatgtttatttagatacagatgtaaatatatttacaattattggaaaggcgttatctatttcaaaaaatgatcagagattagcgtgtggagttattggtatttcttacataaatgaaaagataatacattttcttacaattaacgagaatggcgtttgatatatcagttaatgcgtctaaaacaataaatgcattagtttacttttctactcagcaaaataaattagtcatacgtaatgaagttaatgatacacactacactgtcgaatttgatagggacaaagtagttgacacgtttatttcatataatagacataatgacaccatagagataagaggggtgcttccagaggaaactaatattggttgcgcggttagtatgacttacttgtataataagtatagttttaaactgattttagcagaatatataagacacagaaatactatatccggcaatatttattcggcattgatgacactagatgatttggctattaaacagtatggagacattgatctattatttaatgagaaacttaaagtagactccgattcgggactatttgactttgtcaactttgtaaaggatatgatatgttgtgattctagaatagtagtagctctatctagtctagtatctaaacattgggaattgacaaataaaaaatataggtgtatggcattagccgaacatatatctgatagtattccaatatctgagctatctagactacgatacaatctatgtaagtatctacgcggacacactgagagcatagaggataaatttgattattttgaagacgatgattcgtctacatgttctgccgtaaccgacagggaaacggatgtataattttttttatagcgtgaaggatatgataaaaaatataattgttgtatttatcccattccaatcaccttatatgattctgtaacacaataaaggagtcttatagatgtatagaggtcagatactggtttgataaactgtttattccacataagtatgtttgactttatggttagacccgcatactttaacaaatcactgaaaattggagttaggtattgacctctcagaatcagttgccgttctggaacattaaatgtattttttatgatatactccaacgcatttatgtgggcatacaacaagtcattactaatggaatattccaagagttttagttgtctagtatttaacaagagaagagatttcaacagactgtttatgaactcgaatgccgcctcattgtcgcttatattgatgatgtcgaattctcccaatatcatcaccgatgagtagctcatcttgttatcgggatccaagttttctaaagatgtcattaaaccctcgatcatgaatggatttatcatcatcgtttttatgttggacatgagcttagtccgtttgtccacatctatagaagatgatttctgaattatttcatatatctctctctttaactccaggaacttgtcaggatggtctactttaatatgttctcgtctaagagatgaaaatctttggatggttgcacgcgacttttctctaaaggatgacgttgcccaagatcctctcttaaatgaatccatcttatccttggacaagatggacagtctattttccttagatggtttaatatttttgttacccatgatctataaaggtagacctaatcgtctcggatgaccatatatttattttcagttttattatacgcataaattgtaaaaaatatgttaggtttacgaaaatgtctcgtggggcattaatcgtttttgaaggattggacaaatctggaaaaacaacacaatgtatgaacatcatggaatcaataccttcaaacacaataaaataccttaactttcctcagagatccactgtcactggaaagatgatagatgactatctaactcgtaaaaaaacctataatgatcatatagttaatctattattttgtgcaaatagatgggagtttgcatcttttatacaagaacaactagaacagggaattactttaatagttgatagatacgcattttctggagtagcgtatgccgccgctaaaggcgcgtcaatgactctcagtaagagttatgaatctggattgcctaaacccgacttagttatattcttggaatctggtagcaaagaaattaatagaaacgtcggtgaggaaatttatgaagatgttacattccaacaaaaggtattacaagaatataaaaaaatgattgaagaaggagatattcattggcaaattatttcttctgaattcgaggaagatgtaaagaaggagttgattaagaatatagttatagaggctatacacacggttactggaccagtggggcaactgtggatgtaatagtgaaattacattttttataaatagatgttagtacagtgttataaatggatgaagcatattactctggcaacttggaatcagtactcggatacgtgtccgatatgcataccgaactcgcatcaatatctcaattagttattgccaagatagaaactatagataatgatatattaaacaaggacattgtaaattttatcatgtgtagatcaaacttggataatccatttatctctttcctagatactgtatatactattatagatcaagagaactatcagactgagttgattaattcattagacgacaatgaaattatcgattgtatagttaataagtttatgagcttttataaggataacctagaaaatatagtagatgctatcattactctaaaatatataatgaataatccagattttaaaactacgtatgccgaagtactcggttccagaatagccgatatagatattaaacaagtgatacgtaagaatatactacaattgtctaataatatccgcgaacgatatttgtgaaaatattaaaaaaaaatactttttttattaaatgacgtcttttcgtgaatttagaaaattatgctgtgctatatatcacgcatcaggatataaagaaaaatctaaattaattagagactttataacagatagggatgataaatatttgatcattaagctattgcttcccggattagacgatagaatttataacatgaacgataaacaaattataaaattatatagtataatatttaaacaatctcaggaagatatgctacaagatttaggatacggatatataggagacactattaggactttcttcaaagagaacacagaaatccgtccacgagataaaagcattttaactttagaagaagtggatagttttttaactacgttatcatccgtaactaaagaatcgcatcaaataaaattattgactgatgtagcatctgtttgtacatgtaatgatttaaaatgtgtagtcatgcttattgataaagatctaaaaattaaagcgggtcctcggtacgtacttaacgctattagtcctaatgcctatgatgtgtttagaaaatctaataacttgaaagagataatagaaaattcatctaaacaaaatctagactctatatctatttctgttatgactccaattaatcccatgttagcggaatcgtgtgattctgtcaataaggcgtttaaaaaatttccatcaggaatgtttgcggaagtcaaatacgatggtgaaagagtacaagttcataaaaataataacgagtttgccttctttagtagaaacatgaaaccagtactctctcataaagtggattatctcaaagaatacataccgaaagcatttaaaaaagctacgtctatcgtattggattctgaaattgttcttgtagacgaacataatgtaccgctcccgtttggaagtttaggtatacacaaaaagaaagaatataaaaactctaacatgtgtttgttcgtgtttgactgtttgtactttgatggattcgatatgacggacattccattgtacgaacgaagatcttttctcaaagatgttatggttgaaatacccaatagaatagtattctcagagttgacgaatattagtaacgagtctcagttaactgacgtattggatgatgcactaacgagaaaattagaaggattggtcttaaaagatattaatggagtatacgaaccgggaaagagaagatggttaaaaataaagcgagactatttgaacgagggttccatggcagattctgccgatttagtagtactaggtgcctactatggtaaaggagcaaagggtggtatcatggcagtctttctaatgggttgttacgacgatgaatccggtaaatggaagacggttaccaagtgttcaggacacgatgataatacgttaagggagttgcaagaccaattaaagatgattaaaattaacaaggatcccaaaaaaattccagagtggttagtagttaataaaatctatattcccgattttgtagtagaggatccgaaacaatctcagatatgggaaatttcaggagcagagtttacatcttccaagtcccataccgcaaatggaatatccattagatttcctagatttactaggataagagaggataaaacgtggaaagaatctactcatctaaacgatttagtaaacttgactaaatcttaatagttacatacaaactgaaaattaaaataacactatttagttggtggtcgccatggatggtgttattgtatactgtctaaacgcgctagtaaaacatggcgaggaaataaatcatataaaaaatgatttcatgattaaaccatgttgtgaaagagtttgtgaaaaagtcaagaacgttcacattggcggacaatctaaaaacaatacagtgattgcagatttgccatatatggataatgcggtatccgatgtatgcaattcactgtataaaaagaatgtatcaagaatatccagatttgctaatttgataaagatagatgacgatgacaagactcctactggtgtatataattattttaaacctaaagatgccattcctgttatcatatctataggaaaggataaagatgtctgtgaactattaatctcatcagacatatcgtgtgcatgcgtggagttaaattcatatcacgtagccattcttcccatggatgtttccttttttaccaaaggaaatgcatcattgattattctcctgtttgatttctctatcgatgcggcacctctcttaagaagtgtaaccgataataatgttattatatctagacaccagcgtctacatgacgagcttccgagttccaattggttcaagttttacataagtataaagtccgactattgttctatattatatatggttgttgatggatctgtgatgcatgcgatagctgataatagaactcacgcaattattagcaaaaatatattagacaatactacgattaacgatgagtgtagatgctgttattttgaaccacagattaggattcttgatagagatgagatgctcaatggatcatcgtgtgatatgaacagacattgtattatgatgaatttacctgatgtaggcgaatttggatctagtatgttggggaaatatgaacctgacatgattaagattgctctttcggtggctggtaatttaataagaaatcgagactacattcccgggagacgaggatatagctactacgtttacggtatagcctctagataatttttttaagcacgaaataaaaaacataattttaaaccaatctatttcatactattttgtgtgatcaccatggacataaagatagatattagtatttctggtgataaatttacggtgactactaggagggaaaatgaagaaagaaaaaaatatctacctctccaaaaagaaaaaactactgatgttatcaaacctgattatcttgagtacgatgacttgttagatagagatgagatgtttactattctagaggaatattttatgtacagaggtctattaggcctcagaataaaatatggacgactctttaacgaaattaaaaaattcgacaatgatgcggaagaacaattcggtactatagaagaactcaagcagaaacttagattaaattctgaagagggagcagataactttatagattatataaaggtacaaaaacaggatatcgtcaaacttactgtatacgattgcatatctatgataggattgtgtgcatgcgtggtagatgtttggagaaatgagaaactgttttctagatggaaatattgtttacgagcgattaaactgtttattgatgatcacatgcttgataagataaaatctatactgcagaatagactagtatatgtggaaatgtcatagaaagttaaaagttaatgagagcaaaaatatataaggttgtattccatatttgttatttttttctgtaatagttagaaaaatacattcgatggtctatctatcagattattatgtgttataaggtactttttctcataataaactagagtatgagtaagatagtgtttttcaaaacatataaatctaaaattgatggatgagatatacagctattaatttcgaaaatatattttaatctgataactttaaacatggatttttaatggtggtttaacgttttaaaaaaagattttgttattgtagtatatgataatattaaaagatggatataaagaatttgctgactgcatgtactattttttacattactacattggctacggcagatatacctacttcgtcactgccacacgctccggtaaacggggcatgtgacgagggagaatatcttgataagaggcataatcaatgttgtaatcagtgtccacctggagaatttgccaaggttagatgtaatggtaacgataacacaaaatgtgaacgctgcccacctcatacatataccgcaatccccaattactctaatggatgtcatcaatgtagaaaatgcccaacaggatcatttgataaggtaaagtgtaccggaacacagaacagtaaatgttcgtgtcttcctggttggtattgcgctactgattcttcacagactgaagattgtcgagattgtataccaaaaaggagatgtccatgcggatactttggtggaatagatgaacaaggaaatcctatttgtaaatcgtgttgtgttggtgaatattgcgactacctacgtaattatagacttgatccatttcctccatgcaaactatctaaatgtaattaattatgattttgatgataatgttaccatacattatatcgctacttggttagtgtattattcagtatgaagacctattaataattacttatcttttgacgatcttgttataattataatataaaaatacttatggcatagtaactcataattgctgacgcgataaattcgtaataatctgttttgttcaaatttttataaggaatctacaggcataaaaataaaaatataatttataatatactcttacagcgcgccatcatgaataacagcagtgaattgattgctgttattaatggatttagaaatagtggacgattttgtgatattaatatagttattaatgatgaaaggataaacgctcacagactcatcctatctggagcctccgaatatttttccattctgttttccaataattttatcgattctaatgaatacgaagttaatctaagtcatttagattatcaaagtgttaacgatttgatcgattacatttatgggatacctttgagcctaactaacgataacgtgaaatatattctttcaaccgctgattttttacaaattggatctgctattacggagtgtgaaaattacatacttaaaaatctttgttctagaaactgtatcgatttctacatatacgctgataaatataataacaagaaaatagaatcagcgtcgtttaacacaatattacaaaatattttgagactcatcaacgatgaaaactttaaatacttaacagaggaatcaatgataaaaattttaagcgatgatatgttaaatataaaaaatgaggatttcgccccactaattctcattaaatggttagagagtactcaacaaccatgcaccgtcgagttacttaaatgcctcagaatatcattgctttccccacaagttataaaatcactttatagtcatcgactggttagttcaatctacgaatgtataacattcttaaacaatatagcattcttggatgaatcatttcctagataccatagcatcgagttgatatctatcggtataagtaattcgcatgataagatttccataaactgctacaatcataaaaaaaatacatgggaaatgatatcttcacgtagatataggtgtagtttcgcagtggccgtcctggataatattatctatatgatgggtggatatgatcagtccccgtatagaagttcaaaggttatagcgtacaatacatgtacaaattcttggatatatgatataccagagctaaaatatcctcgttctaattgtgggggactggctgatgacgaatacatttattgtataggcggcatacgcgatcaggattcatcgttgacatctagtattgatagatggaagccatcaaaaccatattggcagaagtatgctaaaatgcgcgaaccaaaatgtgatatgggggttgcgatgttaaacggattaatatatgttataggtggaatcgttaaaggtgacacgtgtaccgacgcactagagagtttatcagaagatggatggatgaagcatcaacgtcttccaataaaaatgtccaatatgtcgacgattgttcatgatggcaagatttatatatctggaggttacaacaatagtagtgtagttaatgtaatatcgaatctagtccttagctataattcgatatatgatgaatggaccaaattatcatcattaaacattcctagaattaatcccgctctatggtcagcgcataataaattatatgtaggaggaggaatatctgatgatgttcgaactaatacatctgagacatacgacaaagaaaaagattgttggacattggataatggtcacgtgttaccacgcaattatataatgtataaatgcgaaccgattaaacataaatatccattggaaaaaacacagtacacgaatgattttctaaagtatttggaaagttttataggtagttgatagaacaaaatacataattttgtaaaaataaatcactttttatactaatatgacacgattaccaatacttttgttactaatatcattagtatacgctacaccttttcctcagacatctaaaaaaataggtgatgatgcaactctatcatgtaatcgaaataatacaaatgactacgttgttatgagtgcttggtataaggagcccaattccattattcttttagctgctaaaagcgacgtcttgtattttgataattataccaaggataaaatatcttacgactctccatacgatgatctagttacaactatcacaattaaatcattgactgctagagatgccggtacttatgtatgtgcattctttatgacatcaactacaaatgacactgataaagtagattatgaagaatactccacagagttgattgtaaatacagatagtgaatcgactatagacataatactatctggatctacacattcaccggaaactagttctaagaaacctgattatatagataattctaattgctcgtcggtattcgaaatcggtacccggggatcagcttgcatgcctgcagcaattcccgaggctgtagccgacgatggtgcgccaggagagttgttgattcattgtttgcctccctgctgcggtttttcaccgaagttcatgccagtccagcgtttttgcagcagaaaagccgccgacttcggtttgcggtcgcgagtgaagatccctttcttgttaccgccaacgcgcaatatgccttgcgaggtcgcaaaatcggcgaaattccatacctgttcaccgacgacggcgctgacgcgatcaaagacgcggtgatacatatccagccatgcacactgatactcttcactccacatgtcggtgtacattgagtgcagcccggctaacgtatccacgccgtattcggtgatgataatcggctgatgcagtttctcctgccaggccagaagttctttttccagtaccttctctgccgtttccaaatcgccgctttggacataccatccgtaataacggttcaggcacagcacatcaaagagatcgctgatggtatcggtgtgagcgtcgcagaacattacattgacgcaggtgatcggacgcgtcgggtcgagtttacgcgttgcttccgccagtggcgcgaaatattcccgtgcaccttgcggacgggtatccggttcgttggcaatactccacatcaccacgcttgggtggtttttgtcacgcgctatcagctctttaatcgcctgtaagtgcgcttgctgagtttccccgttgactgcctcttcgctgtacagttctttcggcttgttgcccgcttcgaaaccaatgcctaaagagaggttaaagccgacagcagcagtttcatcaatcaccacgatgccatgttcatctgcccagtcgagcatctcttcagcgtaagggtaatgcgaggtacggtaggagttggccccaatccagtccattaatgcgtggtcgtgcaccatcagcacgttatcgaatcctttgccacgcaagtccgcatcttcatgacgaccaaagccagtaaagtagaacggtttgtggttaatcaggaactgttcgcccttcactgccactgaccggatgccgacgcgaagcgggtagatatcacactctgtctggcttttggctgtgacgcacagttcatagagataaccttcacccggttgccagaggtgcggattcaccacttgcaaagtcccgctagtgccttgtccagttgcaaccacctgttgatccgcatcacgcagttcaacgctgacatcaccattggccaccacctgccagtcaacagacgcgtggttacagtcttgcgcgacatgcgtcaccacggtgatatcgtccacccaggtgttcggcgtggtgtagagcattacgctgcgatggattccggcatagttaaagaaatcatggaagtaagactgctttttcttgccgttttcgtcggtaatcaccattcccggcgggatagtctgccagttcagttcgttgttcacacaaacggtgatacgtacacttttcccggcaataacatacggcgtgacatcggcttcaaatggcgtatagccgccctgatgctccatcacttcctgattattgacccacactttgccgtaatgagtgaccgcatcgaaacgcagcacgatacgctggcctgcccaacctttcggtataaagacttcgcgctgataccagacgttgcccgcataattacgaatatctgcatcggcgaactgatcgttaaaactgcctggcacagcaattgcccggctttcttgtaacgcgctttcccaccaacgctgatcaattccacagttttcgcgatccagactgaatgcccacaggccgtcgagttttttgatttcacgggttggggtttctacaggacgtaacattctagtcgaggaattcatttatagcatagaaaaaaacaaaatgaaattctactatatttttacatacatatattctaaatatgaaagtggtgattgtgactagcgtagcatcgcttctagacatctatatactatatagtaataccaatactcaagactacgaaactgatacaatctcttatcatgtgggtaatgttctcgatgtcgatagccatatgcccggtagttgcgatatacataaactgatcactaattccaaacccacccgctttttatagtaagtttttcacccataaataataaatacaataattaatttctcgtaaaagtagaaaatatattctaatttattgcacggtaaggaagtagaatcataaagaacagtgacggatccccgatccccgacctgcaggcatgcaagctcgactccggaaccaattactgataatgtagaagatcatacagacaccgtcacatacactagtgatagcattaatacagtaagtgcatcatctggagaatccacaacagacgagactccggaaccaattactgataaagaagatcatacagttacagacactgtctcatacactacagtaagtacatcatctggaattgtcactactaaatcaaccaccgatgatgcggatctttatgatacgtacaatgataatgatacagtaccaccaactactgtaggcggtagtacaacctctattagcaattataaaaccaaggactttgtagaaatatttggtattaccgcattaattatattgtcggccgtggcaattttctgtattacatattatatatataataaacgttcacgtaaatacaaaacagagaacaaagtctagatttttgacttacataaatgtctgggatagtaaaatctatcatattgagcggaccatctggtttaggaaagacagccatagccaaaagactatgggaatatatttggatttgtggtgtcccataccactagatttcctcgtcctatggaacgagaaggtgttgattaccattacgttaacagagaggccatctggaagggaatagccgccggaaactttctagaacatactgagtttttaggaaatatttacggaacttctaaaacagctgtgaatacagcggctattaataatcgtatttgtgtgatggatctaaacatcgacggtgttagaagtcttaaaaatacgtacctaatgccttactcggtgtatataagacctacctctcttaaaatggttgagaccaagcttcgtcgtagaaacactgaagctaacgatgagattcatcgtcgtgtgatgttggcaaaaactgacatggatgaggcaggtgaagccggtctattcgacactattatcattgaagatgatgtgaatttagcatatagtaagttaattcagatactacaggaccgtattagaatgtattttaacactaattagagacttaagacttaaaacttgataattaataatataactcgtttttatatgtgtctatttcaacgtctaatgtattagttaaatattaaaacttaccacgtaaaacttaaaatttaaaatgatatttcattgacagatagatcacacattatgaactttcaaggacttgtgttaactgacaattgcaaaaatcaatgggtcgttggaccattaataggaaaaggtggattcggtagtatttatactactaatgacaataattatgtagtaaaaatagagcccaaagctaacggatcattatttaccgaacaggcattttatactagagtacttaaaccatccgttatcgaagaatggaaaaaatctcacaatataaagcacgtaggtcttatcacgtgcaaggcatttggtctatacaaatccattaatgtggaatatcgattcttggtaattaatagattaggtgcagatctagatgcggtgatcagagccaataataatagactaccaaaaaggtcggtgatgttgatcggaatcgaaatcttaaataccatacaatttatgcacgagcaaggatattctcacggagatattaaagcgagtaatatagtcttagatcaaatagataagaataaattatatctagtggattacggattggtttctaaattcatgtctaatggcgaacatgttccatttataagaaatccaaataaaatggataacggtactctagaatttacacctatagattcgcataaaggatacgttgtatctagacgtggagatctagaaacacttggatattgtatgattagatggttgggaggtatcttaccatggactaagatatctgaaacaaagaattgtgcattagtaagtgccacaaaacagaaatatgttaacaatactgcgactttgttaatgaccagtttgcaatatgcacctagagaattgctgcaatatattaccatggtaaactctttgacatattttgaggaacccaattacgacaagtttcggcacatattaatgcagggtgtatattattaagtgtggtgtttggtcgataaaaattaaaaaataacttaatttattattgatctcgtgtgtacaaccgaaatcatggcgatgttttacgcacacgctctcggtgggtacgacgagaatcttcatgcctttcctggaatatcatcgactgttgccaatgatgtcaggaaatattctgttgtgtcagtttataataacaagtatgacattgtaaaagacaaatatatgtggtgttacagtcaggtgaacaagagatatattggagcactgctgcctatgtttgagtgcaatgaatatctacaaattggaaatccgatccatgatcaagaaggaaatcaaatctctatcatcacatatcgccacaaaaactactatgctctaagcggaatcgggtacgagagtctagacttgtgtttggaaggagtagggattcatcatcacgtacttgaaacaggaaacgctgtatatggaaaagttcaacatgattattctactatcaaagagaaggccaaagaaatgagtgcacttagtccaggacctatcatcgattaccacgtctggataggagattgtatctgtcaagttactgctgtggacgtacatggaaaggaaattatgaaaatgagattcaaaaagggtgcggtgcttccgatcccaaatctggtaaaagttaaacttggggagaatgatacagaaaatctttcttctactatatcggcggcaccatcgaggtaaccacctctctggaagacagcgtgaatcatgtactcatgaaacgtttggaaactatacgccatatgtggtctgttgtatatgatcattttgatattgtgaatggtaaagaatgctgttatgtgcatacgcattcatctaatcaaaatcctataccgagtactgtaaaaacaaatttgtacatgaagactatgggatcatgcattcaaatggattccatggaagctctagagtatcttagcgaactgaaggaatcaggtggatggagtcccagaccagaaatgcaggaatttgaatatccagatggagtggaagacactgaatcaattgagagattggcagaggagttcttcaatagatcagaacttcaggctggtgaatcagtcaaatttggtaattctattaattgttaaacatacatctgtttcagctaagcaactaagaacacgtatacggcagcagcttccttctatactctcatcttttaccaacacaaagggtggatatttgttcattggagttgataataatacacacaaagtatttggattcacggtgggttacgactacctcagactgatagagaatgatatagaaaagcatatcaaaagacttcgtgttgtgcatttctgtgagaagaaagaggacatcaagtacgcgtgtcgattcatcaaggtatataaacctggggatgagactacctcgacatacgtgtgcgctatcaaagtggaaagatgctgttgtgctgtgtttgcagattggccagaatcatggtatatggatactaatggtatcaagaagtattctccagatgaatgggtgtcacatataaaattttaattaatgtaactatagagaacaaataataaggttgtaatatcatatagacaataactaacaattaattagtaactgttatctcttttttaactaaccaactaactatatacctattaatacatcgtaattatagttcttaacatctattaatcattaattcgcttctttaattttttataaactaacattgttaattgaaaagggataacatgttacagaatataaattatatatggatttttttaaaaaggaaatacttgactggagtatatatttatctcttcattatatagcacgcgtgttttccaatttttccacatcccatataatacaggattataatctcgttcgaacatacgagaaagtggataaaacaatagttgattttttatctaggttgccaaatttattccatattttagaatatggggaaaatattctacatatttattctatggatgatgctaatacgaatattataattttttttctagatagagtattaaatattaataagaacgggtcatttatacacaatctcgggttatcatcatccattaatataaaagaatatgtatatcaattagttaataatgatcatccagataataggataagactaatgcttgaaaatggacgtagaacaagacattttttgtcctatatatcagatacagttaatatctatatatgtattttaataaatcatggattttatatagatgccgaagacagttacggttgtacattattacatagatgtatatatcactataagaaatcagaatcagaatcatacaatgaattaattaagatattgttaaataatggatcagatgtagataaaaaagatacgtacggaaacacaccttttatcctattatgtaaacacgatatcaacaacgtggaattgtttgagatatgtttagagaatgctaatatagactctgtagactttaatagatatacacctcttcattatgtctcatgtcgtaataaatatgattttgtaaagttattaatttctaaaggagcaaatgttaatgcgcgtaataaattcggaactactccattttattgtggaattatacacggtatctcgcttataaaactatatttggaatcagacacagagttagaaatagataatgaacatatagttcgtcatttaataatttttgatgctgttgaatctttagattatctattatccagaggagttattgatattaactatcgtactatatacaacgaaacatctatttacgacgctgtcagttataatgcgtataatacgttggtctatctattaaacaaaaatggtgattttgagacgattactactagtggatgtacatgtatttcggaagcagtcgcaaacaacaacaaaataataatggaagtactattgtctaaacgaccatctttgaaaattatgatacagtctatgatagcaattactaaacataaacagcataatgcagatttattgaaaatgtgtataaaatatactgcgtgtatgaccgattatgatactcttatagatgtacagtcgctacagcaatataaatggtatattttaagatgtttcgatgaaatagatatcatgaagagatgttatataaaaaataaaactgtattccaattagttttttgtatcaaagacattaatactttaatgagatacggtaaacatccttctttcgtgaaatgcactagtctcgacgtatacggaagtcgtgtacgtaatatcatagcatctattagatatcgtcagagattaattagtctattatccaagaagctggatcctggagataaatggtcgtgttttcctaacgaaataaaatataaaatattggaaaactttaacgataacgaactatccacatatctaaaaatcttataaacattattaaaatataaaatctaagtaggataaaatcacactacatcattgtttccttttagtgctcgacagtgtatactatttttaacgctcataaataaaaatgaaaacgatttccgttgttacgttgttatgcgtactacctgctgttgtttattcaacatgtactgtacccactatgaataacgctaaattaacgtctaccgaaacatcgtttaatgataaccagaaagttacgtttacatgtgatcagggatatcattctttggatccaaatgctgtctgtgaaacagataaatggaaatacgaaaatccatgcaaaaaaatgtgcacagtttctgattatgtctctgaactatataataaaccgctatacgaagtgaattccaccatgacactaagttgcaacggcgaaacaaaatattttcgttgcgaagaaaaaaatggaaatacttcttggaatgatactgttacgtgtcctaatgcggaatgtcaacctcttcaattagaacacggatcgtgtcaaccagttaaagaaaaatactcatttggggaatatatgactatcaactgtgatgttggatatgaggttattggtgcttcgtacataagttgtacagctaattcttggaatgttattccatcatgtcaacaaaaatgtgatatgccgtctctatctaacggattaatttccggatctacattttctatcggtggcgttatacatcttagttgtaaaagtggttttacactaacggggtctccatcatccacatgtatcgacggtaaatggaatcccatactcccaatatgtgtacgaactaacgaaaaatttgatccagtggatgatggtcccgacgatgagacagatttgagcaaactctcgaaagacgttgtacaatatgaacaagaaatagaatcgttagaagcaacttatcatataatcatagtggcgttgacaattatgggcgtcatatttttaatctccgttatagtattagtttgttcctgtgacaaaaataatgaccaatataagttccataaattgctaccgtaaatataaatccgttaaaataattaataatttaataacaaacaagtatcaaaagattaaagacttatagctagaatcaattgagatgtcttcttcagtggatgttgatatctacgatgccgttagagcatttttactcaggcactattataacaagagatttattgtgtatggaagaagtaacgccatattacataatatatacaggctatttacaagatgcgccgttataccgttcgatgatatagtacgtactatgccaaatgaatcacgtgttaaacaatgggtgatggatacacttaatggtataatgatgaatgaacgcgatgtttctgtaagcgttggcaccggaatactattcatggaaatgtttttcgattacaataaaaatagtatcaacaatcaactaatgtatgatataattaatagcgtatctataattctagctaatgagagatatagaagcgcttttaacgacgatggtatatacatccgtagaaatatgattaacaagttgtacggatacgcatctctaactactattggcacgatcgctggaggtgtttgttattatctgttgatgcatctagttagtttgtataaataattatttcaatatactagttaaaattttaagattttaaatgtataaaaaactaataacgtttttatttgtaataggtgcattagcatcctattcgaataatgagtacactccgtttaataaactgagtgtaaaactctatatagatggagtagataatatagaaaattcatatactgatgataataatgaattggtgttaaattttaaagagtacacaatttctattattacagagtcatgcgacgtcggatttgattccatagatatagatgttataaacgactataaaattattgatatgtataccattgactcgtctactattcaacgcagaggtcacacgtgtagaatatctaccaaattatcatgccattatgataagtacccttatattcacaaatatgatggtgatgagcgacaatattctattactgcagagggaaaatgctataaaggaataaaatatgaaataagtatgatcaacgatgatactctattgagaaaacatactcttaaaattggatctacttatatatttgatcgtcatggacatagtaatacatattattcaaaatatgatttttaaaaatttaaaatatattatcacttcagtgacagtagtcaaataacaaacaacaccatgagatatattataattctcgcagttttgttcattaatagtatacatgctaaaataactagttataagtttgaatccgtcaattttgattccaaaattgaatggactggggatggtctatacaatatatcccttaaaaattatggcatcaagacgtggcaaacaatgtatacaaatgtaccagaaggaacatacgacatatccgcatttccaaagaatgatttcgtatctttctgggttaaatttgaacaaggcgattataaagtggaagagtattgtacgggactatgcgtcgaagtaaaaattggaccaccgactgtaacattgactgaatacgacgaccatatcaatttgtacatcgagcatccgtatgctactagaggtagcaaaaagattcctatttacaaacgcggtgacatgtgtgatatctacttgttgtatacggctaacttcacattcggagattctaaagaaccagtaccatatgatatcgatgactacgattgcacgtctacaggttgcagcatagactttgtcacaacagaaaaagtgtgcgtgacagcacagggagccacagaagggtttctcgaaaaaattactccatggagttcgaaagtatgtctgacacctaaaaagagtgtatatacatgcgcaattagatccaaagaagatgttcccaatttcaaggacaaaatggccagagttatcaagagaaaatttaatacacagtctcaatcttatttaactaaatttctcggtagcacatcaaatgatgttaccacttttcttagcatgcttaacttgactaaatattcataactaatttttattaatgatacaaaaacgaaataaaactgcatattatacactggttaacgcccttataggctctaaccattttcaagatgaggtccctgattatagtccttctgttcccctctatcatctactccatgtctattagacgatgtgagaagactgaagaggaaacatggggattgaaaatagggttgtgtataattgccaaagatttctatcccgaaagaactgattgcagtgttcatctcccaactgcaagtgaaggattgataactgaaggcaatggattcagggatatacgaaacaccgataaattataaaaaaagcaatgtgtccgctgtttccgttaataatactattttcgtaactggcggattattcataaataactctaatagcacgatcgtggttaacaatatggaaaaacttgacatttataaagacaaacaatggtcgattatagaaatgcctatggctagggtatatcacggcattgactcgacatttggaatgttatattttgccggaggtctatccgttaccgaacaatatggtaatttagagaaaaacaacgagatatcttgttacaatcctagaacgaataagtggtttgatatttcatatactatttataagatatccatatcatcattgtgtaaactaaataacgtcttctatgtatttagtaaggacattggatatgtggaaaagtatgatggtgcatggaagttagtacatgatcgtctccccgctataaaggcattatcaacttctccttattgattgaaaatgaaaatataaatagtttttatgtatagcagtattaccctatagttttattgcttactactaacatggatacagatgttacaaatgtagaagatatcataaatgaaatagatagagagaaagaagaaatactaaaaaatgtagaaattgaaaataataaaaacattaacaagaatcatcccaatgaatatattagagaagcactcgttattaataccagtagtaatagtgattccattgataaagaagttatagaatgtatcagtcacgatgtaggaatatagatcatatctactaatttttataatcgatacaaaacataaaaaacaactcgttattacatagcaggcatggaatccttcaagtattgttttgataacgatggcaagaaatggattatcggaaatactttatattctggtaattcaatactctataaggtcagaaaaaatttcactagttcgttctacaattacgtaatgaagatagatcacaaatcacacaagccattgttgtctgaaatacgattctatatatctgtattggatcctttgactatcgacaactggacacgggaacgtggtataaagtatttggctattccagatctgtatggaattggagaaaccgatgattatatgttcttcgttataaagaattcgggaagagtattcgccccaaaggatactgaatcagtcttcgaagcatgcgtcactatgataaacacgttagagtttatacactctcgaggatttacccatggaaaaatagaaccgaggaatatactgattagaaataaacgtctttcactaattgactattctagaactaacaaactatacaagagtggaaactcacatatagattacaacgaggacatgataacttcaggaaatatcaattatatgtgtgtagacaatcatcttggagcaacagtttcaagacgaggagatttagaaatgttgggatattgcatgatagaatggttcggtggcaaacttccatggaaaaacgaaagtagtataaaagtaataaaacaaaaaaaagaatataaaaaatttatagctactttctttgaggactgttttcctgaaggaaatgaacctctggaattagttagatatatagaattagtatacacgttagattattctcaaactcctaattatgacagactacgtaaactgtttatacaagattgaaattatattcttttttttatagagtgtggtagtgttacggatatctaatattaatattagactatctctatcgcgctacacgaccaatatcgattactatggatatcttctatgaaaggagagaatgtatttatttctccagcgtcaatctcgtcagtattgacaatactgtattatggagctaatggatccactgctgaacagctatcaaaatatgtagaaacggaggagaacacggataaggttagcgctcagaatatctcattcaaatccatgaataaagtatatgggcgatattctgccgtgtttaaagattcctttttgagaaaaattggcgataagtttcaaactgttgacttcactgattgtcgcactatagatgcaatcaacaagtgtgtagatatctttactgaggggaaaatcaatccactattggatgaaccattgtctcctagcaattagtgccgtatactttaaagcaaaatggttgacgccattcgaaaaggaatttaccagtgattatcccttttacgtatctccgacggaaatggtagacgtaagtatgatgtctatgtacggcaaggcatttaatcacgcatctgtaaaagaatcattcggcaacttttcaatcatagaactgccatatgttggagatactagtatgatggtcattcttccagacaagattgatggattagaatccatagaacaaaatctaacagatacaaattttaagaaatggtgtgactttatggatgctatgtttatagatgttcacattcccaagtttaaggtaacaggctcgtataatctggtggatactctagtaaagtcaggactgacagaggtgttcggttcaactggagattatagcaatatgtgtaatttagatgtgagtgtcgacgctatgatccacaaaacgtatatagatgtcaatgaagagtatacagaagcagctgcagcaacttctgtactagtggcagactgtgcatcaacaattacaaatgagttctgtgcagatcatccgttcatctatgtgattaggcatgttgatggaaaaattcttttcgttggtagatattgctctccgacaactaattgttaaccattttttttaaaaaaaatagaaaaaacatgtggtattagtgcaggtcgttgttcttccaattgcaattggtaagatgacggccaactttagtacccacgtcttttcaccacagcactgtggatgtgacagactgaccagtattgatgacgtcaaacaatgtttgactgaatatatttattggtcgtcctatgcataccgcaacaggcaatgcgctggacaattgtattccacactcctctcttttagagatgatgcggaattagtgttcatcgacattcgcgagctggtaaaaaatatgccgtgggatgatgtcaaagattgtacagaaatcatccgttgttatataccggatgagcaaaaaaccatcagagagatttcggccatcatcggactttgtgcatatgctgctacttactggggaggtgaagaccatcccactagtaacagtctgaacgcattgtttgtgatgcttgagatgctaaattacgtggattataacatcatattccggcgtatgaattgatgagttgtacatcttgacattttctttcttctcttctccctttcttctcttctcccttcctccctcttctccctttcccagaaacaaacttttttacccactataaaataaaatgagtatactacctattatatttcttcctatatttttttattcttcattcgttcagacttttaacgcgtctgaatgtatcgacaaagggcaatattttgcatcattcatggagttagaaaacgagccagtaatcttaccatgtcctcaaataaatacgctatcatccggatataatatattagatattttatgggaaaaacgaggagcggataatgatagaattataccgatagataatggtagcaatatgctaattctgaacccgacacaatcagactctggtatttatatatgcattaccacgaacgaaacctactgtgacatgatgtcgttaaatttgacaatcgtgtctgtctcagaatcaaatatagatcttatctcgtatccacaaatagtaaatgagagatctactggcgaaatggtatgtcccaatattaatgcatttattgctagtaacgtaaacgcagatattatatggagcggacatcgacgccttagaaataagagacttaaacaacggacacctggaattattaccatagaagatgttagaaaaaatgatgctggttattatacatgtgttttagaatatatatacggtggcaaaacatataacgtaaccagaattgtaaaattagaggtacgggatagaataataccttctactatgcaattaccagatggcattgtaacttcaataggtagtaatttgactattgcatgcagagtatcgttgagacctcccacaacggacaccgacgtcttttggataagtaatggtatgtattacgaagaagatgatggggacggaaacggtagaataagtgtagcaaataaaatctatatgaccgataagagacgtgttattacatcccggttaaacattaatcctgtcaaggaagaagatgctacaacgtttacgtgtatggcgtttactattcctagcatcagcaaaacagttactgttagtataacgtgaatgtatgttgttacatttccatgtcaattgagtttataagaatttttatacattatcttccaacaaacaattgacgaacgtattgctatgattaactcccacgatactatgcatattattaatcattaacttgcagactatacctagtgctattttgacatactcgtgttcttgtgtaattgcggtatctatattattaaagtacgtaaatctagctatagttttattatttaattttagataatataccgtctccttatttttaaaaattgccacatcctttattaaatcatgaatgggaatttctatgtcatcgttagtatattgtgaacaacaagagcagatatctataggaaagggtggaatgcgatacattgatctatgtagttttaaaacacacgcgaactttgaagaatttatataaatcattccatcgatacatccttctatgttgacatgtatatatccaggaattcttttattaatgtcaggaaatgtataaactaaaacattgcccgaaagcggtgcctctatctgcgttatatccgttcttaacttacaaaatgtaaccaatacctttgcatgacttgttttgttcggcaacgttagtttaaacttgacgaatggattaattacaatagcatgatccgcgcatctattaagtttttttactttaacgcccttgtatgtttttacagagactttatctaaatttctagtgcttgtatgtgttataaatataacgggatatagaaccgaatcacctaccttagatacccaattacattttatcagatccagataataaacaaattttgtcgccctaactaattctatattgttatatattttacaattggttatgatatcatgtaataacttggagtctaacgcgcatcgtcgtacgtttatacaattgtgatttagtgtagtatatctacacatgtatttttccgcactatagtattctggactagtgataaaactatcgttatatctgtcttcaatgaactcatcgagatattgctctctgtcatattcatacacctgcataaactttctagacatcttacaatccgtgttattttaggatcatatttacatatttacgggtatatcaaagatgttagattagttaatgggaatcgtctataataatgaatattaaacaattatatgaggacttttaccacaaagcatcataaaaatgagtcgtcgtctgatttatgttttaaatatcaaccgcaaatcaactcataaaatacaagagaatgaaatatatacatattttagtcattgcaatatagaccatacttctacagaacttgattttgtagttaaaaactatgatctaaacagacgacaacctgtaactgggtatactgcactacactgctatttgtataataattactttacaaacgatgtactgaagatattattaaatcatgacgtaaatgtaacgatgaaaaccagtagcggacgtatgcctgtttatatattgcttactagatgttgtaatatttcacatgatgtagtgatagatatgatagacaaagataaaaaccacttattacatagagactattccaacctattactagagtatataaaatctcgttacatgttattgaaggaagaggatatcgatgagaacatagtatccactttattagataagggaatcgatcctaactttaaacaagacggatatacagcgttacattattattatttgtgtctcgcacacgtttataaactaggtgagtgtagaaaaccgataacgataaaaaaggccaagcgaattatttctttgtttatacaacatggagctaatctaaacgcgttagataattgtggtaatacaccattccatttgtatcttagtattgaaatgtgtaataatattcatatgactaaaatgctgttgacttttaatccgaatttcaaaatatgtaataatcatggattaacgcctatactatgttatataacttccgactacatacaacacgatattcttgttatgttaatacatcactatgaaacaaatgttggagaaatgccgatagatgagcgtcgtatgatcgtattcgagtttatcaaaacatattctacacgtccggcagattcgataacttatttgatgaataggtttaaaaatataaatatttatacccgctatgaaggaaagacattattacacgtagcatgtgaatataataatacacaagtaatagattatcttatacgtatcaacggagatataaatgcgttaaccgacaataacaaacacgctacacaactcattatagataacaaagaaaattccccatataccattaattgtttactgtatatacttagatatattgtagataagaatgtgataagatcgttggtggatcaacttccatctctacctatcttcgatataaaatcatttgagaaattcatatcctactgtatacttttagatgacacattttacgataggcacgttaagaatcgcgattctaaaacgtatcgatacgcattttcaaaatacatgtcgtttgataaatacgatggtataataactaaatgtcacgacgaaacaatgttactcaaactgtccactgttctagacactacactatatgcagttttaagatgtcataattcgagaaagttaagaagatacctcaacgagttaaaaaaatataataacgataagtcctttaaaatatattctaatattatgaatgagagataccttaatgtatattataaagatatgtacgtgtcaaaggtatatgataaactatttcctgttttcacagataaaaattgtctactaacattactaccttcagaaattatatacgaaatattatacatgctgacaattaacgatctttataatatatcgtatccacctaccaaagtatagttgtatttttctcatgcgatgtgtgtaaaaaaactgatattatataaatattttagtgccgtataataaagatgacgatgaaaatgatggtacatatatatttcgtatcattattgttattgctattccacagttacgccatagacatcgaaaatgaaatcacagaattcttcaataaaatgagagatactctaccagctaaagactctaaatggttgaatccagcatgtatgttcggaggcacaatgaatgatatagccgctctaggagagccattcagcgcaaagtgtcctcctattgaagacagtcttttatcgcacagatataaagactatgtggttaaatgggagaggctagaaaagaatagacggcgacaggtttctaataaacgtgttaaacatggtgatttatggatagccaactatacatctaaattcagtaaccgtaggtatttgtgcaccgtaactacaaagaatggtgactgtgttcagggtatagttagatctcatattaaaaaacctccttcatgcattccaaaaacatatgaactaggtactcatgataagtatggcatagacttatactgtggaattctttacgcaaaacattataataatataacttggtataaagataataaggaaattaatatcgacgacattaagtattcacaaacgggaaaggaattaattattcataatccagagttagaagatagcggaagatacgactgttacgttcattacgacgacgttagaatcaagaatgatatcgtagtatcaagatgtaaaatacttacggttataccgtcacaagaccacaggtttaaactaatactagatccgaaaatcaacgtaacgataggagaacctgccaatataacatgcactgctgtgtcaacgtcattattgatcgacgatgtactgattgaatgggaaaatccatccggatggcttataggattcgattttgatgtatactctgttttaactagtagaggcggtatcaccgaggcgaccttgtactttgaaaatgttactgaagaatatataggtaatacatataaatgtcgtggacacaactattattttgaaaaaacccttacaactacagtagtattggagtaaatatacaatgcatttttatatacattactgaattattattactgaattattattactgaattattattaattatatcgtatttgtgctatagaatggatgaagatacgcgactatctaggtatttgtatctcaccgatagagaacatataaatgtagactctattaaacagttgtgtaaaatatcagatcctaatgcatgttatagatgtggatgtacggctttacatgagtacttttataattatagatcagtcaacggaaaatacaagtatagatacaacggttactatcaatattattcatctagcgattatgaaaattataatgaatattattatgatagaactggtatgaacagtgagagtgataatatatcaatcaaaacagaatatgaattctatgatgaaacacaagatcaaagtacacaactagtaggttacgacattaaactcaaaaccaatgaggatgattttatggctatgatagatcagtgggtgtccatgattatatagatgaatcaattaataaagtagtatatggaagagagtctcacgtaagatggcgggatatatggcaagaacataatgatggcgtatacagtataggaaaggagtgcatagataatatatacgaagacaaccataccgtagacgaattctacaagatagacagcgtatcagatgtagatgacgcggaacacatatctccgataactaaaaaaccatagaatcagttgatgataatacctacatttctaatcttccgtataccatcaaatacaaaatattcgagcaacaataagtattttttatacctttaaaactgataaataaattttttctagtgatattttggcaagatgagaatcctatttctcatcgctttcatgtatgggtgtgttcactcatatgttaacgcggttgaaaccaaatgtccaaatctagacattgtaacatcttctggagaatttcattgttcaggatgtgtggaacatatgcctgagtttagctatatgtattggttggcaaaggatatgaaatcggacgaggataccaagtttatagaacatctgggtgatggcatcaaagaagatgaaaccgttcgtaccacagatagtggaatcgtcactctacgtaaagtccttcatgtgactgatactaataaatttgataattataggttcacttgtgtcctcgctacgctagatggcatttataaaaagaatgtttgctgaagtagttgtgtgctactatttttatttatgatataatctaatggaattaatttgaattgatatttatccaatactaaagattatattagaatcaaattaatcttttatacgagaaaaaataacgacatacgtcgtcaacaaattaaactttttatttattagttaactagcttatagaacttgctcattgttatgtttctaaaacgggtacggcatataggacaattatccgacgcaccggtttctcttcgtgttctatgccatatattgatgcatgttatgcaaaatatatgagtacacgaatccaataaaccaaagtatctatcgttttgagtaaacaacttcatagcaaattccacattctttttctttacttactctatacacgtcctcgtatttatttagtattttgatgatatccaactcagaaatggttgttgtattattgggtgtatttggagtataggtattattagctatgtaccaatttaccaaccctcttaatattgattgataatcacatcggttatccaattaataactaaattgtagtgtatatatagaccatatatgtttctatttttttgacagttacgtatagtttcagtaagttttgattgttgtattcctgtatctctagataagttagtcatatagtcccttccggcgatacgttttttccaagcccgaaattgattagccaaatgtgtatttatttttgtgatattgatataatatttcggataatgcatactgttagtcttatatcatttggttcatctatgtattgtaatattgttacatgatctatagatgatgtattgattttggcaggatcgaattccatatccgcgactaaacagtgaaaaaaatgtaaatactttttaaattttaaattagtaaaacttttttttattttttatgattccaaaaatactgaatacaaagtcctaaattataaatatggagatcatactaccacaacttattattatgtatacaaggccggtgtaatagatagatatatataattctattacaccggcagacaattaccgaccggtatttgtcgttaccaacataccgtataatatgtaatatacaattccataacccattgacagttgttatacatcaaaattgcaattcttttgattacgatgttataagaatgtagttaattgatgtatgatgttaatgtgtcctctttcctcttataacatcgtaatcaaaaacttttttataatatatacctaataatgtgtcttaatagttctcgtgattcgtcaaacaatcattcttataaaatataataaagcaacgtaaaaacacataaaaataagcgtaactaataagacaatggatatttacgacgataaaggtctacagactattaaactgtttaataatgaatttgattgtataaggaatgacatcagagaattatttaaacatgtaactgattccgatagtatacaacttccgatggaagacaattctgatattatagaaaatatcagaaaaatactatatagacgattaaaaaatgtagaatgtgttgacatcgataacacaataacttttatgaaatacgatccaaatgatgataataagcgtacgtgttctaattgggtacccttaactaataactatatggaatattgtctagtaatatatttggaaacaccgatatgtggaggcaaaataaaattataccaccctacaggaaatataaagtcggataaggatattatgtttgcaaagactctagactttaaatcaacgaaagtgttaactggacgtaaaacaattgccgttctagacatatccgtttcatataatagatcaatgactactattcactacaacgacgacgttgatatagatatacatactgataaaaatggaaaagagttatgttattgttatataacaatagatgatcattacttggttgatgtggaaactataggagttatagtcaatagatctggaaaatgtctgttagtaaataaccatctaggtataggtatcgttaaagataaacgtataagcgatagttttggagatgtatgtatggatacaatatttgacttttctgaagcacgagagttattttcattaactaatgatgataacaggaatatagcatgggacactgataaactagacgatgatacagatatatggactcccgtcacagaagatgattacaaatttctttctagactagtattgtatgcaaaatctcaatcggatactgtatttgactattatgttcttactggtgatacggaaccacccactgtattcattttcaaggtaactagattttactttaatatgccgaaataaaaaatttttgtataatatctagaggtagaggtattgtttagataaatacaaataacatagatacatcgcatacttagcatttttataaatatacataagacatacactttatacatttttgtaaaaatactcataaaaaaatttataaaaattatggcacaaccatatcttgtataggtagtttagttcgtcgagtgaacctataaacagataatagacaacacataataatgcctactaatacaagcataataccgggagatgggatatatgacgttgtagtgtttgggttttctgaacgttgatagtctactaatactacatgctgacatctaatgcctgtataaccatgagagcatctacaatacataccgtcaatatctctagcgtggatacagtcaccgtgtaaacaatatccatctccctctggaccgcataatctgatagctggaatatctgttgtagcgtttgtaatttctggcaatgtcgtttcgatagcgttaccactatcggcgaatgatctgattatcatagcagcgaacaacaacatcagataatttatcaacatttttgatggattctgtgtttatgctgtttctcagtgtgtgtttatgacaagattgggaattttatattattaattcagtaatataaactaataatatattgttaattgtgtaaataatataaaaataacaatacaatattgaatgtgttgctgttaaaaatgtatgtgttaatataatagaataaaataaatgagtatgatcattttagataacgattgattttatcattaccgcttcattcttatattctttgcttacggaacctatatttagaaacatctactaacaattttttatgcttgcattattaatggtatgtaatatgattgattgtgtacgcaataccaatttgttaagtatgaatacggggtacaaacataaattgaaatttaacattatttatttatgatatatatcgttatcgttaggtctataccatggatatctttaaagaactaatcttaaaacaccctgatgaaaatgttttgatttctccagtttccattttatctactttatctattctaaatcatggagcagctggttctacagctgaacaactatcaaaatatatagagaatatgaatgagaatacacccgatgacaataatgatgacatggaggtagatattccgtattgtgcgacactagctaccgcaaataaaatatacggtagcgatagtatcgagttccacgcctccttcctacaaaaaataaaagacgattttcaaactgtaaactttaataatgctaaccaaacaaaggaactaatcaacgaatgggttaagacaatgacaaatggtaaaattaattccttattgactagtccgctatccattaatactcgtatgacagttgttagcgccgtccattttaaagcaatgtggaaatatccattttctaaacatcttacatatacagacaagttttatatttctaagaatatagttaccagcgttgatatgatggtgggtaccgagaataacttgcaatatgtacatattaatgaattattcggaggattctctattatcgatattccatacgagggaaactctagtatggtaattatactaccggacgacatagaaggtatatataacatagaaaaaaatataacagatgaaaaatttaaaaaatggtgtggtatgttatctactaaaagtatagacttgtatatgccaaagtttaaagtggaaatgacagaaccgtataatctggtaccgattttagaaaatttaggacttactaatatattcggatattatgcagattttagcaagatgtgtaatgaaactatcactgtagaaaaatttctacatacgacgtttatagatgttaatgaggagtatacagaagcatcggccgttacaggagtatttacgattaacttttcgatggtatatcgtacgaaggtctacataaaccatccattcatgtacatgattaaagacaccacaggacgtatactttttatagggaaatactgctatccgcaataaatataaacaaatagacttttataaagagtcttcaacgataagtatatcgacatactacttatgctgcgaaagattctgaacgagaacgactatctcaccctcttggatcatatccgcactgctaaatactaaatctccactacactttttatcatcttatgaggaatgattgccttcgtgaaataggaataattagcaccagaatagctatggattattgtggtagagagtgcactattctatgtcgtctactggatgaagatgtgacgtacaaaaaaataaaactagaaattgaaacgtgtcacaacttatcaaaacatatagatagacgaggaaacaatgcgctacattgttacgtctccaataaatgcgatacagacattaagattgttctctcgcggagtcgagagactttgtagaaacaacgaaggattaactccgctaggagtatacagtaagcatagatacgtaaaatctcagattgtgcatctactgatatccagctattcaaattcctctaacgaactcaagtcgaatataaatgatttcgatctgtattcggataatatcgacttacgtctgctaaaatacctaattgtggataaacggatacgtccgtccaagaatacgaattatgcaatcaatggtctcggattggtggatatatacgtaacgacgcctaatccgagaccagaagtattgctatggcttcttaaatcagaatgttacagcaccggttacgtatttcgtacctgtatgtacgacagtgatatgtgtaagaactctcttcattactatatatcgtctcatagagaatctcaatctctatccaaggatgtaattaaatgtttgatcgataacaatgtttccatccatggcagagacgaaggaggatctttacccatccaatactactggtctttctcaaccatagatatagagattgttaaattattattaataaaggatgtggacacgtgtagagtatacgacgtcagccctatattagaggcgtattatctaaacaagcgatttagagtaaccccatataatgtagacatggaaatcgttaatcttcttattgagagacgtcatactcttgtcgacgtaatgcgtagtattacttcgtacgattccagagaatataaccactacatcatcgataacattctaaagagatttagacaacaggatgaatccatcgtacaagccatactgataaactacttacattacggcgatatggtcgttcgatgcatgttagataacggacaacaactatcctctacacgactactttgttaataataatctcgtcgatgtaaacgtcgtaaggtttatcgtggaaaatatggacacgcggctgtaaatcacgtatcgaacaatggccgtctatgtatgtacggtctgatattatcgagatttaataattgcgggtatcactgttatgaaaccatactgatagatgtatttgatatactaagcaagtacatggatgatatagatatgatcgataactctactatattacgcggtcgatgtcaataatatacaatttgcaaagcggttattggaatatggagcgagtatcacgctcgataatcaatacggccatccagaaaagcagttacagaagagaaaacaaaacgaaatcgttgttctacaagatgtctctccctacgacgattactacgtaaaaaagatactagcctactgcctattaagggacgagtcattcgcggaactacatagtaaattctgtttaaacgaggactataaaagtgtatttatgaaaaatatatcattcgataagatagattccatcatcgtgacataagtcgcctcaaagagattcgaatctccgacaccgacctgtatacggtatcacagctatcttaaagccatacattcagacagtcacatttcatttcccatgtacgacgatctcatagaacagtgccatctatcgatggagcgtaaaagtaaactcgtcgacaaagcactcaataaattagagtctaccatcggtcaatctagactatcgtatttgcctccggaaattatgcgcaatatcatctaaacagtatgttgtacggaaagaaccattacaaatattatccatgatagaaagaaaatatctatatgattggagaagtaggaaacaggaacaagacaacgattactacattattaaatcatgaagtccgtattatactcgtatatattgtttctctcatgtataataataaacggaagagatatagcaccgcatgcaccatccgatggaaagtgtaaagacaacgaatacaaacgccataatttgtgtccgggaacatacgcttccagattatgcgatagcaagactaacacacgatgtacgccgtgtggttcgggtaccttcacatctcgcaataatcatttacccgcttgtctaagttgtaacggaagacgcgatcgtgtaacacgactcacaatagaatctgtgaatgctctcccggatattattgtcttctcaaaggatcatccggatgcaaggcatgtgtttcccaaacaaaatgtggaataggatacggagtatccggagacgtcatctgttctccgtgtggtctcggaacatattctcacaccgtctcttccgcagataaatgcgaacccgtacccagaaatacgtttaactatatcgatgtggaaattaacctgtatccagttaacgacacgtcgtgtactcggacgaccactaccggtctcagcgaatccatctcaacgtcggaactaactattactatgaatcataaagactgtaatcccgtatttcgtgatggatacttctccgttcttaataaggtagcgacttcaggtttctttacaggagaaaggtgtgcactctgaatttcgagattaaatgcaataacaaagattcttcctccaaacagttaacgaaagcaaagaatgatactatcatgccgcattcggagacagtaactctagtgggcgacatctatatactatatagtaataccaatactcaagactacgaaactgatacaatctcttatcatgtgggtaatgttctcgatgtcgatagccatatgcccggtagttgcgatatacataaactgatcactaattccaaacccacccactttttatagtaagtttttcacccataaataataaatacaataattaatttctcgtaaaagtagaaaatatattctaatttattgcacggtaaggaagtagaatcataaagaacagtactcaatcaatagcaattatgaaacaatatatcgtcctggcatgcatgtgcctggcggcagctgctatgcctgccagtcttcagcaatcatcctcatcctcctcctcgtgtacggaagaagaaaacaaacatcatatgggaatcgatgttattatcaaagtcacaaagcaagaccaaacaccgaccaatgataagatttgccaatccgtaacggaaattacagagtccgagtcagatccagatcccgaggtggaatcagaagatgattccacatcagtcgaggatgtagatcctcctaccacttattactccatcatcggtggaggtctgagaatgaactttggattcaccaaatgtcctcagattaaatccatctcagaatccgctgatggaaacacagtgaatgctagattgtccagcgtgtccccaggacaaggtaaggactctcccgcgatcactcatgaagaagctcttgctatgatcaaagactgtgaagtgtctatcgacatcagatgtagcgaagaagagaaagacagcgacatcaagacccatccagtactcgggtctaacatctctcataagaaagtgagttacgaagatatcatcggttcaacgatcgtcgatacaaaatgcgtcaagaatctagagtttagcgttcgtatcggagacatgtgcaaggaatcatctgaacttgaggtcaaggatggattcaagtatgtcgacggatcggcatctgaaggtgcaaccgatgatacttcactcatcgattcaacaaaactcaaagcgtgtgtctgaatcgataactctattcatctgaaattggatgagtagggttaatcgaacgattcaggcacaccacgaattaaaaaagtgtaccggacactatattccggtttgcaaaacaaaaatgttcttaactacattcacaaaaagttacctctcgcgacttcttctttttctgtctcaatagtgtgatacgattatgacactattcctattcctattcctatttcctttcagagtatcacaaaaatattaaacctctttctgatggtctcataaaaaaagttttacaaaaatatttttattctctttctctctttgatggtctcataaaaaaagttttacaaaaatatttttattctctttctctctttgatggtctcataaaaaaagttttacaaaaatatttttattctctttctctctttgatggtctcataaaaaaagttttacaaaaatatttttattctctttctctctttgatggtctcataaaaaaagttttacaaaaatatttttattctctttctctctttgatggtctcataaaaaaagttttacaaaaatatttttattctctttctctctttgatggtctcataaaaaaagttttacaaaaatatttttattctctttctctctttgatggtctcataaaaaaagttttacaaaaatatttttattctctttctctctttgatggtctcataaaaaaagttttacaaaaatatttttattctctttctctctttgatggtctcataaaaaaagttttacaaaaatatttttattctctttctctctttgatggtctcataaaaaaagttttacaaaaatatttttattctctttctctctttgatggtctcataaaaaaagttttacaaaaatatttttattctctttctctctttgatggtctcataaaaaagttttacaaaaatatttttattctctttctctctttgatggtctcataaaaaagttttacaaaaatatttttattctctttctctctttgatggtctcataaaaaaagttttacaaaaatatttttattctctttctctctttgatggtctcataa

SEQ ID NO: 10 - DNA, 194711 bp, Vaccinia virus
  Vaccinia virus Western Reserve
atttaaaatataatattaatgtactaaaacttatatattattaatttatctaactaaagttagtaaattatatatataattttataattaatttaattttactaattttatttagtgtctagaaaaaaatgtgtgacccatgactgtaggaaactctagagtgtaagaaagatcgatcgctttatagagaccatcagaaagaggtttaatatttttgtgagaccatcgaagagagaaagagataaaacttttttacgactccatcagaaagaggtttaatatttttgtgagaccatcgaagagagaaagagataaaacttttttacgactccatcagaaagaggtttaatatttttgtgagaccatcgaaggagaaagagataaaacttttttacgactccatcagaaagaggtttaatatttttgtgagaccatcgaaggagaaagagataaaacttttttacgactccatcagaaagaggtttaatatttttgtgagaccatcgaagagagaaagagataaaacttttttacgactccatcagaaagaggtttaatatttttgtgagaccatcgaagagagaaagagataaaacttttttacgactccatcagaaagaggtttaatatttttgtgagaccatcgaaggagaaagagataaaacttttttacgactccatcagaaagaggtttaatatttttgtgagaccatcgaagagagaaagagataaaacttttttacgactccatcagaaagaggtttaatatttttgtgagaccatcgaagagagaaagagataaaacttttttacgactccatcagaaagaggtttaatatttttgtgagaccatcgaagagagaaagagataaaacttttttacgactccatcagaaagaggtttaatatttttgtgagaccatcgaagagagaaagagataaaacttttttacgactccatcagaaagaggtttaatatttttgtgagaccatcgaagagagaaagagataaaacttttttacgactccatcagaaagaggtttaatatttttgtgagaccatcgaagagagaaagagaaagagatagttgatctagatatttttcttagtacaaaagtcaatgttttaaaatatatggacaagaatttgtctgtataaaaacttgtgtgaaattttgtaccaaagaaaaaatgtgagcagtatcccctacatggattttactagatcatttatataccaaaaaatattatacgatctacgttttattatatgattttaacgtgtaaattataaacattattttatgatatacaattgtctggtaacctagatgggcataggggatgttgataagctcgacgagtatatgttgttggacgttattgtttaagaaatagttgatgcatcagaaagagaataaaaaatattttagtgagaccatcgaagagagaaagagataaaacttttttacgactccatcagaaagaggtttaatatttttgtgagaccatcgaagagagaaagagataaaacttttttacgactccatcagaaagaggtttaatatttttgtgagaccatcgaagagagaaagagataaaacttttttacgactccatcagaaagaggtttaatatttttgtgagaccatcgaagagagaaagagataaaacttttttacgactccatcagaaagaggtttaatatttttgtgagaccatcgaagagagaaagagataaaacttttttacgactccatcagaaagaggtttaatatttttgtgagaccatcgaagagagaaagagataaaacttttttacgactccatcagaaagaggtttaatatttttgtgagaccatcgaagagagaaagagataaaacttttttacgactccatcagaaagaggtttaatatttttgtgagaccatcgaagagagaaagagataaaacttttttacgactccatcagaaagaggtttaatatttttgtgagaccatcgaagagagaaagagataaaacttttttacgactccatcagaaagaggtttaatatttttgtgagaccatcgaagagagaaagagataaaacttttttacgactccatcagaaagaggtttaatatttttgtgagaccatcgaagagagaaagagataaaacttttttacgactccatcagaaagaggtttaatatttttgtgagaccatcgaagagagaaagagataaaacttttttacgactccatcagaaagaggtttaatatttttgtgagaccatcgaagagagaaagagataaaacttttttacgactccatcagaaagaggtttaatatttttgtgagaccatcgaagagagaaagagataaaacttttttacgactccatcagaaagaggtttaatatttttgtgagaccatcgaagagagaaagagataaaacttttttacgactccatcagaaagaggtttaatatttttgtgagaccatcgaagagagaaagagataaaacttttttacgactccatcagaaagaggtttaatatttttgtgagaccatcgaagagagaaagagataaaacttttttacgactccatcagaaagaggtttaatatttttgtgagaccatcgaagagagaaagagataaaacttttttacgactccatcagaaagaggtttaatatttttgtgagaccatcgaagagagaaagagaataaaaatattttatgactccattgaagagagaaagagaaaatgagaatgagaataaaaatattttagtgacaccatcagaaagaggtttaatatttttgtgagaccatcgaagagagaaagagaataaaaatattttatgactccattgaagagagaaagagaaaatgagaatgagaataaaaatattttagtgacaccatcagaaagaggtttaatattttttatgagaccatcaaagagagaaagagaataaaaatatttttgtaaaactttttttatgagaccatcaaagagagaaagagaataaaaatatttttgtaaaactttttttatgagaccatcaaagagagaaagagaataaaaatatttttgtaaaactttttttatgagaccatcaaagagagaaagagaataaaaatatttttgtaaaactttttttatgagaccatcaaagagagaaagagaataaaaatatttttgtaaaactttttttatgagaccatcaaagagagaaagagaataaaaatatttttgtaaaactttttttatgagaccatcaaagagagaaagagaataaaaatatttttgtaaaactttttttatgagaccatcaaagagagaaagagaataaaaatatttttgtaaaactttttttatgagaccatcagaaagaggtttaatatttttgtgataccctgaaaggaaataggaataggaataggaatagtgtcataatcgtatcacactattgagacagaaaaagaagaagtcgcgagaggtaactttttgtgaatgtagttaagaacatttttgttttgcaaaccggaatatagtgtccggtacacttttttaattcgtggtgtgcctgaatcgttcgattaaccctactcatccaatttcagatgaatagagttatcgattcagacacacgctttgagttttgttgaatcgatgagtgaagtatcatcggttgcaccttcagatgccgatccgtcgacatacttaaatccatccttgacctcaagttcagatgattccttgcacatgtctccgatacgaacgctaaactctagattcttgacacattttgtatcgacgatcgttgaaccgatgatatcttcgtaactcactttcttatgagagatgttagacccgagtactggatgggtcttgatgtcgctgtctttctcttcttcgctacatctgatgtcgatagacacctcacagtctttgatcatagccagagcttcttcatgagtgatcgcgggagagtccttaccttgtcctggggacacgctggacaatctagcattcactgtgtttccatcagcggattctgagatggatttaatctgaggacatttggtgaatccaaagttcattctcagacctccaccgatgatggagtaataagtggtaggaggatctacatcctcgactgatgtggaatcatcttctgattccacctcgggatctggatctgactcggactctgtaatttccgttacggattggcaaatcttatcattggtcggtgtttggtcttgctttgtgactttgataataacatcgattcccatatgatgtttgttttcttcttccgtacacgaggaggaggatgaggatgattgctgaagactggcaggcacatgcatgccaggacgatatattgtttcatgattgctattgattgagtactgttctttatgattctacttccttaccgtgcaataaattagaatatattttctacttttacgagaaattaattattgtatttattatttatgggtgaaaaacttactataaaaagcgggtgggtttggaattagtgatcagtttatgtatatcgcaactaccgggcatatggctatcgacatcgagaacattacccacatgataagagattgtatcagtttcgtagtcttgagtattggtattactatatagtatatagatgtcgacgctagatagacagtctccgaatgcggcatgataccgtcatcattctttgctttcgttaactgtttggaggaaaaatttttgttattgcatttaatctcgaaattcagagtgcacacctttctcctgtaaagaaacctgaagttgctaccttattaaggacggagaagtattcctcacgaaatacgggattacagtctttatgattcatagtaatagttagttccgacgttgagatggattcgctgagaccggtagtggtcgttaactggatacagattaatttccacatcgatatagttaaaggtattactgggtacgggttcgcatttatctgcggaagagacggtgtgagaatatgttccgagaccacacggagaacagatgacgtctccggatactccgtatcctattccacattttgtttgggaaacacatgccttgcatccggatgatcctttgagaagacaataatatccgggagagcattcacagattctattgtgagtcgtgttacacggtcgcgtcttccgttacaacttagacaagcgggtaaatgattattgcgagatgtgaaggtacccgaaccacacggcgtacattgtgtgttagtcttgctatcgcataatctggaagcgtatgttcccggacacaaattatggcgtttgtattcgttgtctttacactttccatcggatggtgcatgcggtgctatatctcttccgtttattattatacatgagagaaacaatatatacgagtataatacggacttcatgatttaataatgtagtaatcgtcgtcttgttcctgtttcctacttctccaatcatatagatattttctttctatcatggataatatttgtaatggttcttttcgtacaacatactgtttagatgatattgcgcataatttccggaggcaaatacgatagtctagattgaccgatggtagactctaatttattgagtgctttgtcgacgagtttacttttacgctccatcgatagatggcactgttctatgagatcgtcgtacatgggaaatgaaatgtgactgtctgaatgtatggctttaagatagctgtgataccgtatacaggtcggtgtcggagattcgaatctctttaaggcgacttatgtcacgatgatggaatctatcttatcgaatgatatatttttcataaatacacttttatagtcctcgtttaaacagaatttactatgtagttccgcgaatgactcgtcccttaataggcagtaggctattatcttctttacgtagtaatcgtcgtagggagagacatcttgtagaacaacgatttaatcataggtagagatactttcagtctgtggtggatgatgtcattcacaacatccgccttgtatatgatgtttctgttttcaaacaccaagtcgaataccgtctttagtcggaaggttgatgtcgtatccgatgtatgaggcaacattgttgttacaattttgaaaggcggtattatagtattcgtctttctgaatgtcgaacctatctagtagataccgtagtatattgagagtgtatccttgattatgttttatgaatagataaagtagatgttgtccttcttccttttgttcgtgccaattgagtaacattatgagaatatgacctgttgcacaatcgttccatgatgggtgtacaatcaagattattacgtatcctcgtatcggctcctcgagataaaagagcatacaccacacgaggactatgtttggtatactgttgaaggtaagtgtgtaaccgcgttaatgtttgctccataatctattatcgcgtagatgaatcgcttctcggctcgcatcttagtgtgacttaacttgtaataattgcttttgtagaacgtggatatgtgtttacagtagtaatgaagagaagtgagttcatcctcgtcggatcctttgtacagaacgtaatagtttaagctcccattgaatttatatctaagataacacagcaatagatcggatgatttactaaagtcatcaatggtgtccgttagtatatcaaagatcttgttatcgattgatagtggtgtcctttttcatccttgctatcaaagttacgcatgccgtggtgtaacaatatctttaatacagatggattaaatcgtgtattcatcgtatagcaatgtaatggagagttacctcgtttattcagatcgcagtgtttaataactagcttaaacagatgagacgatgtatccacatcaaagaacgtgaaatacatatgacagacattgttgacagaaacgtgaccttcattcttaccgtcgtccataaatacgttaggtatgtaccacatactgtcgcgaacgatgcgtacaatctcgtccatctcataatgatttactttttcataattaaagatgtgaaagaaaaacagaacaatatatttttttagtaatgtttatgcgagacatataaaataaactccgtgtttatgatcatttttaacagcaacacattcaatattgtattgttatttttatattatttacacaattaacaatatattattagtttatattactgaattaataatataaaattcccaatcttgtcataaacacacactgagaaacagcataaacacaaaatccatcaaaaatgtcgatgaaatatctgatgttgttgttcgctgctatgataatcagatcattcgccgatagtggtaacgctatcgaaacgacatcgccagaaattacaaacgctacaacagatattccagctatcagattatgcggtccagagggagatggatattgtttacacggtgactgtatccacgctagagatattgacggtatgtattgtagatgctctcatggttatacaggcattagatgtcagcatgtagtattagtagactatcaacgttcagaaaacccaaacactacaacgtcatatatcccatctcccggtattatgcttgtattagtaggcattattattattacgtgttgtctattatctgtttataggttcactcgacgaactaaactacctatacaagatatggttgtgccataatttttataaatttttttatgagtatttttacaaaaaaaatgtataaagtgtatgtcttatgtatatttataaaaatgctaagtatgcgatgtatctatgttatttgtatttatctaaacaatacctctacctctagatattatacaaaaattttttatttcggcatattaaagtaaaatctagttaccttgaaaatgaatacagtgggtggttccgtatcaccagtaagaacataatagtcgaatacagtatccgattgagattttgcatacaatactagtctagaaagaaatttgtaatcatcttctgtgacgggagtccatatatctgtatcatcgtctagtttatcagtgtcccatgctatattcctgttatcatcattagttaatgaaaataactctcgtgcttcagaaaagtcaaatattgtatccatacatacatctccaaaactatcgcttatacgtttatctttaacgatacctatacctagatggttatttactaacagacattttccagatctattgactataactcctatagtttccacatcaaccaagtaatgatcatctattgttatataacaataacataactcttttccatttttatcagtatgtatatctatatcaacgtcgtcgttgtagtgaatagtagtcattgatctattatatgaaacggatatgtctagaacggcaattgttttacgtccagttaacactttctttgatttaaagtctagagtctttgcaaacataatatccttatccgactttatatttcctgtagggtggtataattttattttgcctccacatatcggtgtttccaaatatattactagacaatattccatatagttattagttaagggtacccaattagaacacgtacgcttattatcatcatttggatcgtatttcataaaagttattgtactatcgatgtcaacacattctacattttttaatcgtctatatagtatttttctgatattttctataatatcagaattgtcttccatcggaagttgtatactatcggaatcagttacatgtttaaataattctctgatgtcattccttatacaatcaaattcattattaaacagtttaatagtctgtagacctttatcgtcgtaaatatccattgtcttattagttacgcttatttttatgtgttttacgttgctttattatattttataagaatgattgtttgacgaatcacgagaactattaagacacattattaggtatatattataaaaaagtttttgattacgatgttataagaggaaagaggacacattaacatcatacatcaattaactacattcttataacatcgtaatcaaaagaattgcaattttgatgtataacaactgtcaatgggttatggaattgtatattacatattatacggtatgttggtaacgacaaataccgatcggtaattgtctgccggtgtaatagaattatatatatctatctattacaccggctgagtatgcataataataagttgtggtagtatgatctccatatttataatttaggactttgtattcagtatttttggaatcataaaaaataaaaaaaagttttactaatttaaaatttaaaaagtatttacatttttttcactgtttagtcgcggatatggaattcgatcctgccaaaatcaatacatcatctatagatcatgtaacaatattacaatacatagatgaaccaaatgatataagactaacagtatgcattatccgaaatattaataacattacatattatatcaatatcacaaaaataaatacacatttggctaatcaatttcgggcttggaaaaaacgtatcgccggaagggactatatgactaacttatctagagatacaggaatacaacaatcaaaacttactgaaactatacgtaactgtcaaaaaaatagaaacatatatggtctatatatacactacaatttagttattaatgtggttattgattggataaccgatgtgattgttcaatcaatattaagagggttggtaaattggtacatagctaataatacctatacacccaataatacaacaaccatttctgagttggatatcatcaaaatactggataaatacgaggacgtgtatagagtaagtaaagaaaaagaatgtggaatttgctatgaagttgtttactcaaaacgatagatactttggtttattggattcgtgtactcatatattttgcataacatgcatcaatatatggcataaaacacgaagagaaaccggtgcgtcggataattgtcctatatgtcgtacccgttttagaaacataacaatgagcaagttctataagctagttaactaataaataaaaagtttaatttgttgacgacgtatgtcgttatttttctcgtatgaaagattaaattcaattcaattcgttgtttctaatataatctgccgtattggatggattctcaagacaattgcatttagattatattatcatgaataaaaatagtagcacgcactacttcagccaaatattcttttttgaaacgccatctatcgtagtgaggacacaagtgaacctataattatcaaatttattagtatcagtcacatgaaggactttctgtagagtgacgattctaccatctatggtactaacggtttcatcctccttgataccctcacccaaatgttctataaatttagcatcctcgtccgatctcatatcctttgccaaccaatacatgtagctaaaattaggcataaatttcacacatccagtgcaacgaaattctccagaagatgttacgatgtttaggttaggacatttgatttcgtcggcattaacatatgggtgaacacacccatacatgaaagcgatgagaaataggattctcatcttgccaaaatatcactagaaaaaatttatttatcaattttaaaggtataaaaaatacttattgttgctcgaatattttgtatttgatggtatacggaagattagaaatgtaggtattatcatcaactgattctatggttttatgtattctatcatgtttcactattgcgtcggaaataatatcatatgcttccacatatattttattttgttttaactcataatactcacgtaattctggattattggcatatctatgaataattttagctccatgatcagtaaatattaatgagaacatagtattaccacctaccattatttttttcatttcgttcaattcttgattgcaaagatctatataatcattatagcgttgacttatggactctggaatcttagacgatgtacagtcatctataatcatggcatatttaatacattgttttatagcatagtagttatctacgatgttagatatttctctcaatgaatcaatcacacaatctaatgtaggtttatgacataatagcattttcagcagttcaatgtttctagattcgttgatggcaatggctatacatgtatatccgttatttgatctaatgttgacatctgaaccggattctagcagtaaagatactagagattgtttattatatctaacagccttgtgaagaagtgtttctcctcgtttgtcaatcatgttaatgtctttaagataaggtaggcaaatgtttatagtactaagaattgggcaagcataagacatgtcacaaagaccctttttgtatgtataagtgtaaaaattataacattcatagttggatttacataggtgtccaatcgggatctctccatcatcgagataattgatggcatctcccttccttttttagtagatatttcatcgtgtaagaatcaatattaatatttctaaagtattcgtgtatagcctctttatttaccacagttccatattccactagagggatatcgccgaatgtcatatactcaattagtatatgttggaggacatccgagttcattgttttcaatatcaaaaagatggtttccttatcatttctccatagtggtacaatactacacattattccgtgcggctttccattttccaaaaacaatttgaccaaatctaaatctacatctttattgtatctataatcactatttagataatcagccataattactcgagtgcaacatgttagatcgtctatatatgaataagcagtgttatctattcctttcattaacaatttaacgatgtctatatctatatgagatgacttaatataatattgaagagctgtacaatagtttttatctatagaagacggcttgattccgtgattaattagacatttaacaacttccggacgcacatatgctctcgtatccgactttgaatacagatgagagatgatatacagatgcaatacggtaccgcaatttcgtagttgataatcatcatacgcgtatcagtactcgtcctcataaagaacactgcagccattttctatgaacaaatcaataattttaggaacaggatcattgtcattacataattttctataactgaacgatggttttcacatttaacactcaagtcaaatccatgttctaccaacacctttatcaagtcaacgtctacatttttggatttcatatagctgaatatattaaagtcatttatgttgctaaatccagtggcttctagtagagccatcgctatatcctttaactttaacatgtctactatttgtgtattcttctaatggggtagctgtctccaatttttgcgtaatggattagtgccactgtctagtagtagtttgacgacctcgacattattacaatgctcattaaaaaggtatgcgtgtaaagcattattcttgaattggttcctggtatcattaggatctctgtctctcaacatctgtttaagttcatcgagagccacctcctcattttccagatagtcaaacattttgactgaatgagctactgtgaactctatacacccacacaactaatgtcattaaatattatttttttgaatgtatttataccatgtcaaaaacttgtacaattattaataaaaataatttagtgtttaaattttaccagttccagattttacacctccgttaaccccactttttacaccactggacgatcctcctccccacattccaccgccaccagatgtataagttttagatcctttattactaccatcatgtccatggataaagacactccacatgccgccactactaccccctttagaagacatattaataagacttaaggacaagtttaacaataaaattaatcacgagtaccctactaccaacctacactattatatgattatagtttctatttttacagtaccttaactaaagtctctagtcacaagagcaatactaccaacctacactattatatgattatagtttctatttttataggaacgcgtacgagaaaatcaaatgtctaatttctaacggtagtgttgataaacgattatcgtcaatggatacctcctctatcatgtcgtctattttcttactttgttctattaacttattagcattatatattatttgattataaaacttatattgcttattagcccaatctgtaaatatcggattattaacatatcgtttctttgtaggtttatttaacatgtacatcactgtaagcatgtccgtaccatttattttaatttgacgcatatccgcaatttctttttcgcagtcggttataaattctatatatgatggatacatgctacatgtgtacttataatcgactaatatgaagtacttgatacatattttcagtaacgatttattattaccacctatgaataagtacctgtgatcgtctaggtaatcaactgttttcttaatacattcgatggttggtaatttactcagaataatttccaatatcttaatatataattctgctatttctgggatatatttatctgccagtataacacaaatagtaatacatgtaaacccatattttgttattatattaatgtctgcgccattatctattaaccattctactaggctgacactatgcgacttaatacaatgataaagtatactacatccatgtttatctattttgtttatatcatcaatatacggcttacaaagttttagtatcgataacacatccaactcacgcatagagaaggtagggaataatggcataatatttattaggttatcatcattgtcattatctacaactaagtttccattttttaaaatatactcgacaactttaggatctctattgccaaatttttgaaaatatttatttatatgcttaaatctatataatgtagctccttcatcaatcatacatttaataacattgatgtatactgtatgataagatacatattctaacaatagatcttgtatagaatctgtatatcttttaagaattgtggatattaggatattattacgtaaactattacacaattctaaaatataaaacgtatcacggtcgaataatagttgatcaactatataattatcgattttgtgatttttcttcctaaactgtttacgtaaatagttagatagaatattcattagttcatgaccactatagttactatcgaataacgcgtcaaatatttcccgtttaatatcgcatttgtcaagataataatagagtgtggtatgttcacgataagtataataacgcatctcttttttgtgtgaaattaaatagtttatcacgtccaaagatgtagcataaccatcttgtgacctagtaataatataataatagagaactgttttacccattctatcatcataatcagtggtgtagtcgtaatcgtaatcgtctaattcatcatcccaattataatattcaccagcacgtctaatctgttctattttgatcttgtatccatactgtatgttgctacatgtaggtattcctttatccaataatagtttaaacacatctacattgggatttgatgttgtagcgtatttctctacaatattaataccatttttgatactatttatttctatacctttcgaaattagtaatttcaataagtctatatcgatgttatcagaacatagatattcgaatatatcaaaatcattgatatttttatagtcgactgacgacaataacaaaatcacaacatcgtttttgatattattatttttcttggtaacgtatgcctttaatggagtttcaccatcatactcatataatggatttgcaccactttctatcaatgattgtgcactgctggcatcgatgttaaatgttttacaactatcatagagtatcttatcgttaaccatgattggttgttgatgctatcgcattttttggtttctttcatttcagttatgtatggatttagcacgtttgggaagcatgagctcatatgatttcagtactgtagtgtcagtactattagtttcgatcagatcaatgtctagatctatagaatcaaaacacgataggtcagaagataatgaatatctgtacgcttctttttgtactgtaacttctggttttgttagatggttgcatcgtgctttaacatcaatggtacaaattttatcctcgctttgtgtatcatattcgtctctagtataaaattctatattcagattatcatgcgatgtgtatacgctaacggtatcaataaacggagcacaccatttagtcataacagtaatccaaaattttttaaagtatatcttaacgaaagaagttgtgtcattgtctacggtgtatggtactagatcctcataagtgtatatatctagagtaatgtttaatttattaaatggttgataatatggatcctcatgacaatttccgaagatggaaatgagatatagacatgcaataaatctaatcgaagacatggttactccttaaaaaaatacgaataatcaccttggctatttagtaagtgtcatttaacactatactcatattaatccatggactcataatctctatacgggattaacggatgttctatatacggggatgagtagttttcttctttaactttatactttttactaatcatatttagactgatgtatgggtaatagtgtttaaagagttcgttctcatcatcagaataaatcaatatctctgtttttttgttatacagatgtattacagcctcatatattacgtaatagaacgtgtcatctaccttattaactttcaccgcatagttgtttgcaaatacggttaatcctttgacctcgtcgatttccgaccaatctgggcgtataatgaatctaaactttaatttcttgtaatcattcgaaataatttttagtttgcatccgtagttatcccctttatgtaactgtaaatttctcaacgcgatatctccattaataatgatgtcgaattcgtgctgtatacccatactgaatggatgaactaacgaatatcaacggcgttaatagtaatttactttttcatctttacatattgggtactagttttactatcataagtttataaattccacaagctactatggaataagccaaccatcttagtataccacacatgtcttaaagtttattaattaattacatgttgttttatatatatcgctacgaatttaaagagaaatcagtttaggaagaaaaaaattatctatctacatcatcacgtctctgtattctacgatagagtgctactttaagatgagacatatccgtgtcatcaaaaatatactccattaaaatgattattccggcagcgaacttgatattggatatatcacaacctttgttaatatctacgacaatagacagcagtcccatggttccataaacagtgagtttatctttctttgaagcgatagtttgtagagatcttataaaaccgtcaaacgacatcgcatttatatctttagctaattcatatatgttaccatcgtaatatctaaccgcgtctatcttaaacgtttccatcgctttaaagacgtttccgatagatggtctcatttcatcagtcatactgagccaacaaatataatcgtgtataacatctttgatagaatcagactctaaagaaaacgaatcggctttattatacgcattcatgataaacttaatgaaaaatgtttttcgttgtttaagttggatgaatagtatgtcttaataattgttattatttcattaattaatatttagtaacgagtacactctataaaaacgagaatgacataactagttatcaaagtgtctaggacgcgtaattttcatatggtatagatcctgtaagcattgtctgtattctggagctattttctttatcgcattagtaagttcagaatatgttataaatttaaatcgaataacgaacatgactttagtaaagtcgtctatattaactcttttattttctagccatcgtaataccatgtttaagatagtatattctctagttactacgatctcatcgttgtctagaatatcacatactgaatctacatccaattttagaaattggtctgtgttacatatctcttctatattattgttgatgtattgtcgtagaaaactattacgtagaccattttctttataaaacgaatatatagtactccaattatctttaccgatatatttgcacacataatccattctctcaatcactacatctttaagattttcgttgttaagatatttggctaaactatataattctattagatcatcaacagaatcagtatatatttttctagatccaaagacgaactctttggcgtcctctataatattcccagaaaagatattttcgtgttttagtttatcgagatctgatctgttcatatacgccatgattgtacggtacgttatgataaccgcataaaataaaaatccattttcatttttaaccaatactattcataattgagattgatgtaatactttgttactttgaacgtaaagacagtacacggatccgtatctccaacaagcacgtagtaatcaaatttggtgttgttaaacttcgcaatattcatcaatttagatagaaacttatactcatcatctgttttaggaatccatgtattattaccactttccaacttatcattatcccaggctatgtttcgtccatcatcgttgcgcagagtgaataattcttttgtattcggtagttcaaatatatgatccatgcatagatcggcaaagctattgtagatgtgatttttcctaaatctaatataaaactcgtttactagcaaacactttcctgatttatcgaccaagacacatatggtttctaaatctatcaagtggtggggatccatagttatgacgcagtaacatagattattacattcttgactgtcgctaatatctaaatatttattgttatcgtattggattctgcatatagatggcttgtatgtcaaagatatagaacacataaccaatttatagtcgcgctttacattctcgaatctaaagttaagagatttagaaaacattatatcctcggatgatgttatcactgtttctggagtaggatatattaaagtctttacagatttcgtccgattcaaataaatcactaaataatatcccacattatcatctgttagagtagtatcattaaatctattatattttatgaaagatatatcactgctcacctctatatttcgtacatttttaaactgtttgtataatatctctctgatacaatcagatatatctattgtgtcggtagacgataccgttacatttgaattaatggtgttccattttacaacttttaacaagttgaccaattcatttctaatagtatcaaactctccatgattaaatattttaatagtatccattttatatcactacggacacaaagtagctgacataaaccattgtataatttttatgttttatgtttattagcgtacacattttggaagttccggcttccatgtatttcctggagagcaagtagatgatgaggaaccagatagtttatatccgtacttgcacttaaagtctacattgtcgttgtatgagtatgatcttttaaacccgctagacaagtatccgtttgatattgtaggatgtggacatttaacaatctgacacgtgggtggatcggaccattctcctcctgaacacaggacaccagagttaccaatcaacgaatatccactattgcaactataagttacaacgctcccatcggtataaaaatcctcgtatccgttatgtcttccgttggatatagatggaggggattggcatttaacagattcacaaataggtgcctcgggattccataccatagatccagtagatcctaattcacaatacgatttagattcaccgatcaaatgatatccgctattacaagagtacgttatactagagccaaagtctactccaccaatatcaagttggccattatcgatatctcgaggcgatgggcatctccgtttaatacattgattaaagagtgtccatccagtacctgtacatttagcatatataggtcccattttttgctttctgtatccaggtagacatagatattctatagtgtctcctatgttgtaattagcattagcatcagtctccacactattcttaaatttcatattaatgggtcgtgacggaatagtacagcatgatagaacgcatcctattcccaacaatgtcaggaacgtcacgctctccaccttcatatttatttatccgtaaaaatgttatcctggacatcgtacaaataataaaaagcccatatatgttcgctattgtagaaattgtttttcacagttgctcaaaaacgatggcagtgacttatgagttacgttacactttggagtctcatctttagtaaacatatcataatattcgatattacgagttgacatatcgaacaaattccaagtatttgattttggataatattcgtattttgcatctgctataattaagatataatcaccgcaagaacacacgaacatctttcctacatggttaaagtacatgtataattctatccatttgtcttccttaactatatatttgtatagataattacgagtctcgtgagtaattccagtaattacatagatgtcgccgtcgtactctacagcataaactatactatgatgtctaggcatgggagacttttttatccaacgatttttagtgaaacattccacatcgtttaatactacatatttttcatacgtggtataaactccacccattacatatatatcatcgtttacgaataccgacgcgcctgaatatctaggagtaattaagtttggaagtcttatccatttcgaagtgccgtgtttcaaatattctgccacacccgttgaaatagaaaattctaatcctcctattacatataactttccatcgttaacacaagtactaacttctgattttaacgacgacatattagtaaccgttttccattttttcgtttcaagatctacccgcgatacggaataaacatgtctattgttaatcatgccgccaataatgtatagacaattatgtaaaacatttgcattatagaattgtctatctgtattaccgactatcgtccaatattctgttctaggagagtaatgggttattgtggatatataatcagagtttttaatgactactatattatgttttataccatttcgtgtcactggctttgtagatttggatatagttaatcccaacaatgatatagcattgcgcatagtattagtcataaacttgggatgtaaaatgttgatgatatctacatcgtttggatttttatgtatccactttaataatatcatagctgtaacatcctcatgatttacgttaacgttttcgtgggataagatagttgtcagttcatcctttgataattttccaaattctggatcggatgtcaccgcagtaatattgttgattatttctgacatcgacgcattatatagttttttaattccatatcttttagaaaagttaaacatccttatacaatttgtggaattaatattatgaatcatagtttttacacatagatctactacaggcggaacatcaattattatggcagcaactagtatcatttctacattgtttatggtgatgtttatcttcttccagcgtatatagtctaatagcgattcaaacgcgtgatagtttataccattcaatataatcgcttcatcctttagatggtgatcctgaattcgtttaaaaaaattatacggagatgccgtaataatttccttattcacttgtataatttccccattgatagaaaatatcacgctttccattcttgaagtactataagtaattatagtataatgtaaaggtttatatattcaatattttttataaaaaaatcattttgacattaattcctttttaaatttccgtctatcatctatagaaacgtattctatgaatttataaaatgcttttacgtgtcctatcgtaggcgatagaaccgctaaaaagcctatcgaatttctacaaaagaatctgttatatggtatagggagagtataaaacattaaatgtccgtacttattaaagtattcagtagccaatcctaactctttcgaatacttattaatggctcttgttctgtacgaatctatttttttgaacaacggacctagtggtatatcttgttctatgtatctaaaataatgtctgactagatccgttagtttaatatcctcagtcatcttgtctagaatggcaaatctaactgcgggtttaggctttagtttagtttttatatctacatctatgtctttatctaacaccaaaaatataatagctaatattttattacaatcatccggatattcttctacgatctcactaactaatgtttctttggttatactagtatagtcactatcggacaaataaagaaaatcagatgatcgatgaataatacatttaaattcatcatctgtaagatttttgagatgtctcattaaaatattattagggtcagtactcattatcattcggcagctattacttattttatttttctgtattttattatttttcaccatatagatcaatcattagatcatcaaaatatgtttcaatcatcctaaagagtatggtgaatgactcttcccatctaatttctgaacgttcaccaatgtctctagccactttggcactaatagcgatcattcgcttagcgtcttctatattattaactggttgattcaatctatctagcaatggaccgtcggacagcgtcattctcatgttcttaatcaatgtacatacatcgccgtcatctaccaattcatccaacaacataagctttttaaaatcatcattataataggtttgatcgttgtcatttctccaaagaatatatctaataagtagagtcctcatgcttagtaatttaactattttagttaacaactattttttatgttaaatcaattagtacaccgctatgtttaatacttattcatattttagtttttaggattgagaatcaatacaaaaaattaatgcatcattaattttagaaatacttagtttccacgtagttaatgaaacatttgaactcatcgtacaggacgttctcgtacaggacgtaactataaaccggtttatatttgttcaagatagatacaaatccgataactttttttacgaattctacgggatccactttaaaagtgtcataccgggttctttttattcttttaaacagatcaatggtgtgatgttgattaggtcttttacgaatttgatatagaatagcgttcacatatcctccataatggtcaatcgccatttgttcgtatgtcataaattctttaattatatgacactgtgtattatttagttcatccttgttcatcattaggaatctatccaaaatggcaattatactagaactataggtgcgttgtatacacatattgatgtgtctgtttatacaatccatgatatttggatccatgctactaccttcgggtaaaattgtagcatcatataccatttctagtactttaggttcattattatccattgcagaggacgtcatgatcgaatcctaaaaaaatatattatttttatgttattttgttaaaaataatcatcgaatacttcgtaagatactccttcatgaacataatcagttacaaaacgtttatatgaagtaaagtatctacgatttttacaaaagtccggatgcataagtacaaagtacgcgataaacggaataataatagatttatctagtctatctttttctatagctttcatagttagatacatggtctcagaagtaggattatgtaacatcagcttcgataaaatgactgggttatttagtcttacacattcgctcatacatgtatgaccgttaactacaaagtctacactaaaatgattgaacaatagatagtctaccattgtttcgtattcagatagtacagcgtagtacatagcatcttcacaaattatatcattgtctaatagatatttgacgcatcttatggatcccacttcaacagccatcttaaaatcggtagaatcatattgctttcctttatcattaataatttctaaaacatcatctctatcataaaagatacaaatattaactgtttgatccgtaataacattgctagtcgatagcaatttgttaataagatgcgctgggctcaatgtcttaataagaagtgtaagaggactatctccgaatttgttttgtttattaacatccgttgatggaagtaaaagatctataatgtctacattcttgactgttttagagcatacaatatggagaggtgtatttccatcatgatctggttttgagggactaattcctagtttcatcatccatgagattgtagaagcttttggattgtctgacataagatgtctatgaatatgatttttgccaaatttatccactatcctggcttcgaatccgatggacattatttttttaaacactctttctgaaggatctgtacacgccaacaacggaccacatccttcttcatcaaccgagttgttaatcttggctccatactgtaccaataaatttattctctctatgacttcatcatctgttcccgagagataatatagaggtgttttattatgtttatcacacgcgtttggatctgcgccgtgcgtcagcagcatcgcgactattctattattattaattttagaagctatatgcaatggataatttccatcatcatccgtctcatttggagagtatcctctatgaagaagttcttcgacaaatcgttcatctagtcctttaattccacaatacgcatgtagaatgtgataattatttccagaaggttcgatagcttgtagcatattcctaaatacatctaaatttttactattatatttggcataaagagatagataatactcggccgacataatgttgtccattgtagtataaaaattaatatttctatttctatttctgtatatttgcaacaatttactctctataacaaatatcataacttagttcttttatgtcaagaaggcactggtttagttcatctataaatgtcacgccataactaccacgcatgctatactcagaattatgataaagatatttatccttggggtgtaggtaatggggattaatctttgttggatcagtctctaagttaacacatgtcacacatgatccatttatagttatatcacacgatgatgatttatgaattgattccggaagatcgctatcgtattttgtggttccacaattcatttccatacatgttattgtcacactaatattatgatgaactttatctagccgctgagtggtaaacaacagaacagatagtttattatctttaccaacaccctcagccgctgccacaaatctctgatccgtatccatgatggtcatgtttatttctagtccgtatccagtcaacactatgttagcatttctgtcgatatagctttcactcatatgacactcaccaataatagtagaattaatgtcgtaatttacaccaatagtgagttcggcggcaaagtaccaataccggtaatcttgtcgaggaggacatatagtattcttgtattctaccgaatacccgagagatgcgatacaaaagagtaagactaatttgtaaaccatcttactcaaaatatgtaacaatagtacgatgcaatgagtaagacaataggaaatctatcttatatacacataattattctatcaattttaccaattagttagtgtaatgttaacaaaaatgtgggagaatctaattagtttttctttacacaattgacgtacatgagtctgagttccttgtttttgctaattatttcatccaatttattattcttgactatatcgagatcttttgtataggagtcagacttgtattcaacatgcttttctataatcattttagctatttcggcatcatccaatagtacattttccagattagcagaatagatattaatgtcgtatttgaacagagcctgtaacatctcaatgtctttattatctatagccaatttaatgtccggaatgaagagaagggaattattggtgtttgtcgacgtcatatagtcgagcaagagaatcatcatatccacgtgtccattttttatagtgatgtgaatacaactaaggagaatagccagatcaaaagtagatggtatctctgaaagaaagtaggaaacaatacttacatcattaagcatgacggcatgataaaatgaagttttccatccagttttcccatagaacatcagtctccaatttttcttaacaaacagttttaccgtttgcatgttaccactatcaaccgcataatacaatgcggtgtttcccttgtcatcaaattgtgaatcatccagtccactgaatagcaaaatctttactattttggtatcttccaatgtggctgcctgatgtaatggaaattcattctctagaagatttttcaatgctccagcgttcaacaacgtacatactagacgcacgttattatcagctattgcataatacaaggcactatgtccatggacatccgccttaaatgcatctttgctagagagaaagcttttcagctgcttagacttccaagtattaattcgtgacagatccatgtctgaaacgagacgctaattagtgtatattttttcattttttataattttgtcatattgcaccagaattaataatatctctaatagatctgattagtagatacatggctatcgcaaaacaacatatacacatttaataaaaataatatttattaagaaaattcagatttcacgtacccatcaatataaataaaataatgattccttacaccgtacccatattaaggagattccaccttacccataaacaatataaatccagtaatatcatgtctgatgatgaacacaaatggtgtattaaattccagtttttcaggagatgatctcgccgtagctaccataatagtagatgcctctgctacagttccttgttcgtcgacatctatctttgcattctgaaacattttataaatatataatgggtccctagtcatatgtttaaacgacgcattatctggattaaacatactaggagccatcatttcggctatcgacttaatatccctcttattttcgatagaaaatttagggagtttaagattgtacactttattccctaattgaaacgaccaatagtctaattttgcagccgtaatagaatctgtgaaatgggtcatattatcacctattgccaggtacatactaatattagcatccttatacggaaggcgtaccatatcatattcttcgtcatcgattgtgattgtatttccttgcaatttagtaactacgttcatcatgggaaccgttttcgtaccgtacttattagtaaaactagcattgcgtgttttagtgatatcaaacggatattgccatatacctttaaaatatatagtattaatgattgcccatagagtattattgtcgagcatattagaatctactacattagacataccggatctacgttctactatagaattaattttattaaccgcatctcgtctaaagtttaatctatataggccgaatctatgatattgttgataatacgacggtttaatgcacacagtattatctacgaaactttgataagttagatcagtgtacgtatatttagatgttttcagcttagctaatcctgatattaattctgtaaatgctggacccagatctctttttctcaaatccatagtcttcaataattctattctagtattacctgatgcaggcaatagcgacataaacatagaaaacgaataaccaaacggtgagaagacaatattatcatcttgaatatttttatacgctactataccggcattggtaaatccttgcagacgataggtagacactgaacacgttaacgatagtatcaataacgcaatcatgattttatggtattaataattaaccttatttttatgttcggtataaaaattattgatgtctacacatccttttgtaattgacatctatatatccttttgtataatcaactctaatcactttaacttttacagttttccctaccagtttatccctatattcaacatatctatccatatgcatcttaacactctctgccaagatagcttcaaagtgaggatagtcaaaaagataaatatatagagcataatccttctcgtatactctgccctttattacatcacccgcattgggcaacgaataacaaaatgcaagcatcttgttaacgggctcgtaaattgggataaaaattatgtttttatatctattttattcaagagaatattcaggaatttctttttccggttgtatctcatcgcagtatatatcatttgtacattgtttcatattttttaatagtctacaccttttagtaggactagtatcgtacaattcatagctgtattttgaattccaatcacgcataaaaatatcttccaattgttgacgaagacctaatccatcatccggtgtaatattaatagatgctccacatgtatccgtaaagtaatttcctgtccaatttgaggtacctatatacgccgttttatcggttaccatatatttggcatggtttaccctagaatacggaatgggaggatcagcatctggtacaataaatagctttacttctatatttatgtttttagattttagcatagcgatagatcttaaaaagtttctcatgataaacgaagatcgttgccagcaactaatcaatagcttaactgacacttgtctgtctatagcggctcttcttaattcatcttctatataaggccaaaacaaaatattgcctgccttcgaataaataatagggataaagttcataacagatacataaacgaatttactcgcatttctgatacatgacaataaagcggttaaatcattggttctttccatagtacatagttgttgcggtgcagaagcaataaatacagagtgtggaacgccgcttacgttaatactaagaggatgatctgtattataatacgacggataaaagtttttccaattatatggtagattgttaactccaagataccagtatacctcaaaaatttgagtgagatccgctgccaagttcctattattgaagatcgcaatacccaattctttgacctgagttagtgatctccaatccatgttagcgcttcctaaataaatatgtgtattatcagatatccaaaattttgtatgaagaactcctcctaggatatttgtaatatctatgtatcgtacttcaactccggccatttgtagtctttcaacatcctttaatggtttgttagatttattgacggctactctaactcgtactcctcttttgggtaattgtacaatcttgtttaatattatcgtgccgaaattcgtacccacttcatccgataaactccaataaaaagatgatatatctagtgtttttgtggtattggatagaatttccctccacatgttaaatgtagacaaatatactttatcaaattgcatacctataggaatagtctctgtaatcactgcgattgtattatccggattcattttatttgttaaaagaataatcctatatcacttcactctattaaaaatccaagtttctatttctttcatgactgattttttaacttcatccgtttccttatgaagatgatgtttggcaccttcataaatttttatttctctattacaatttgcatgttgcatgaaataatatgcacctaaaacatcgctaatcttattgtttgttccctggagtatgagagtcggggggtgttaatcttggaaattatttttctaaccttgttggtagccttcaagacctgactagcaaatccagccttaattttttcatgattgattaatgggtcgtattggtatttataaactttatccatatctctagatactgattctggacatagctttccgactggcgcatttagtgtgatggttcccataagtttggcagctagcagattcagttttgaaacagcatctgcattaactagaggagacattagaatcattgctgtaaacaagtttggattatcgtaagaggctagctcccatggaatgacccaataagtagatttaatagttaccacgtgctgtaccaaagtcatcaatcatcattttttcaccattacttcttccatgtccaatatgatcatgtgagaatactaaaattcctaacgatgatatgttttcagctagttcgtcataacgtccagaatgtttaccagctccatgacttatgaatactaatgccttaggatatgtaataggtttccaatatatgtaatcattgtccagattgaacatacagtttgcactcatgattcacgttatataactatcaatattaacagttcgtttgatgatcatattatttttatgttttattgataattgtaaaaacatacaattaaatcaatatagaggaaggagacggctactgtcttttgtgagatagtcatggcgactaaattagattatgaggatgctgttttttactttgtggatgatgataaaatatgtagtcgcgactccatcatcgatctaatagatgaatatattacgtggagaaatcatgttatagtgtttaacaaagatattaccagttgtggaagactgtacaaggaattgatgaagttcgatgatgtcgctatacggtactatggtattgataaaattaatgagattgtcgaagctatgagcgaaggagaccactacatcaattttacaaaagtccatgatcaggaaagtttattcgctaccataggaatatgtgctaaaatcactgaacattggggatacaaaaagatttcagaatctagattccaatcattgggaaacattacagatctgatgaccgacgataatataaacatcttgatactttttctagaaaaaaaattgaattgatgatataggggtcttcataacgcataattattacgttagcattctatatccgtgttaaaaaaaattatcctatcatgtatttgagagttttatatgtagcaaacatgatagctgtgatgccaataagctttagatattcacgcgtgctagtgttagggatggtattatctggtggtgaaatgtccgttatataatctacaaaataatcatcgcatatagtatgcgatagtagagtaaacatttttatcgtttctactgggttcatacatcgtctacccaattcggttataaatgaaattgtcgccaatcttacacccaaccccttgttatccattagtatagtattaacttcgttatttatgtcataaactgtaaatgattttgtagatgccatatcatacatgatattcatgtccctattataatcattactaactttatcacaatatatgttgataatatctatatatgatctagtctttgtgggcaactgtctatacaagtcgtctaaacgttgtttactcatatagtatcgaacagccatcattacatggtcccgttccgttgatagataatcgagtatgttagtggacttgtcaaatctatataccatattttctggaagtggatatacatagtcgtgatcaacattattgctagcctcatcttctatatcctgtactataccattatctatatcatctacataatctacgatattattacacataaacatcgacaacatactattgtttattatctaagtcctgttgatccaaacccttgatctcctctatttgtactatctagagattgtacttcttccagttctggataatatatacgttgatagattagctgagctattctatctccagtatttacattaaacgtacattttccattattaataagaatgactcctatgtttcccctataatcttcgtctattacaccgcctcctatatcaatgccttttagggacagaccagacctaggagctattctaccatagcagaacttaggcatggacatactaatatctgtcttaattaactgtcgttctcctggagggatagtataatcgtaagcgctatataaatcatatccggcggcgtaaggtgattgcctagtaggagatttagctctgttagtttccttaacaaatctaactggtgagttaatattcatgttgaacataaaactaatattttatttcaaaattatttaccatcccatatattccatgaataagtgtgatgattgtacacttctatagtatctatatacgattcacgataaaatcctcctatcaatagcagtttattatccactatgatcaattctggattatccctcggataaataggatcatctatcagagtccatgtattgctggattcacaataaaattccgcatttctaccaaccaagaataaccttctaccgaacactaacgcgcatgatttataatgaggataataagtggatggtccaaactgccactgatcatgattgggtagcaaatattctgtagttgtatcagtttcagaatgtcctcccattacgtatataacattgtttatggatgccactgctggattacatctaggtttcagaagactcggcatattaacccaagcagcatccccgtggaaccaacgctcaacagatgtgggatttggtagacctcctactacgtataatttattgttagcgggtatcccgctagcatacagtctggggctattcatcggaggaattggaatccaattgtttgatatataatttaccgctatagcattgttatgtatttcattgttcatccatccaccgatgagatatactacttctccaacatgagtacttgtacacatatggaatatatctataatttgatccatgttcataggatactctatgaatggatacttgtatgatttgcgtggttgtttatcacaatgaaatattttggtacagtctagtatccattttacattatttatacctctgggagaaagataatttgacctgattacatttttgataaggagtagcagatttcctaatttatttcttcgctttatataccacttaatgacaaaatcaactacataatcctcatctggaacatttagttcatcgctttctagaataagtttcatagatagataatcaaaattgtctatgatgtcatcttccagttccaaaaagtgtttggcaataaagtttttagtatgacataagagattggatagtccgtattctatacccatcatgtaacactcgacacaatattcctttctaaaatctcgtaagataaagtttatacaagtgtagatgataaattctacagaggttaatatagaagcacgtaataaattgacgacgttatgactatctatatatacctttccagtatacgagtaaataactatagaagttaaactgtgaatgtcaaggtctagacaaacccttgtaactggatctttatttttcgtgtatttttgacgtaaatgtgtgcgaaagtaaggagataactttttcaatatcgtagaattgactattatattgccacctatagcatcaataattgttttgaatttcttagtcatagacaatgctaatatattcttacagtacacagtattaacaaatatcggcatttatgtttctttaaaagtcaacatctaaagaaaaatgattatcttcttgagacataactcccattttttggtattcacccacacgtttttcgaaaaaattagtttttccttccaatgatatattttccatgaaatcaaacggattggtaacattataaatttttttaaatcccaattcagaaatcaatctatccgcgacgaattctatatatgttttcatcatttcacaattcattcctataagtttaactggaagagccgcagtaagaaattcttgttcaatggataccgcatctgttataatagatctaacggtttcttcactcggtggatgcaataaatgtttaaacatcaaacatgcgaaatcgcagtgcagaccctcgtctctactaattagttcgttggaaaacgtgagtccgggcattaggccacgctttttaagccaaaatatggaagcgaatgatccagaaaagaagattccttctactgcagcaaaggcaataagtctctctccataaccggcgctgtcatgtatccacttttgagcccaatcggccttcttttttacacaaggcatcgtttctatggcattaaagagatagtttttttcattactatctttaacataagtatcgatcaaaagactatacatttccgaatgaatgttttcaatggccatctgaaatccgtagaaacatctagcctcggtaatctgtacttctgtacaaaatcgttccgccaaattttcattcactattccgtcactggctgcaaaaaacgccaatacatgttttataaaatatttttcgtctggtgttagtttattccaatcattgatatctttagatatatctacttcttccactgtccaaaatgatgcctctgcctttttatacatgttccagatgtcataatattggattgggaaaataacaaatctatttggatttggtgcaaggatgggttccataactaaattaacaataacaataaattttttttcagttatctatatgcctgtacttggatcttttgtacatcgatatcgccgcaatcactacaataattacaagtattattgatagcattgttattagtactatcataattaaattatcgacattcatgggtgctgaataatcgttattatcatcattatcattttgtaattgtgacatcatactagataaatcgtttgcgagattgttgtgggaagcgggcatggaggatgaattatcgttattattatttaacgcctcccattcggattcacaaatgttacgcacattcaacattttatggaaactataattttgtgaaaacagataacaagaaaactcgtcatcgttcaaatttttaacgatagtaaaccgattaaacgtcgagctaatttctaacgctagcgactctgttggatatgggtttccagatatatatcttttcagttcccctacgtatctataatcatctgtaggaaatggaagatatttccatttatctactgttcctaatatcatatgtggtggtgtagtagaaccattaagcgcgaaagatgttatttcgcatcgtattttaacttcgcaataatttctggttagataacgcactctaccagtcaagtcaatgatattagcctttacagatatattcatagtagttgtaacgatgactccatcttttagatgcgatactcctttgtatgtaccagaatcttcgtaccgcaaactcgatatatttaaacaagttaatgagatattaacgcgttttatgaatgatgatatataaccagaagttttatcctcggtggctagcgctataaccttatcattataataccaactagtgtgattaatatgtgacacgttagtgtgggtacaaatatgtacattatcgtctacgtcgtattcgatacatccgcatacagccaacaaatataaaatgacaaatactctaacgccgttcgtacccatcttgatgcggtttaataaatgttttgatttcaatttattgtaaaaaaagattcggttttatactgttcgatattctcattgcttatattttcatctatcatctccacacagtcaaatccgtggttagcatgcacctcatcaaccggtaaaagactatcggactcttctatcattataactctagaatatttaatttggtcattattaatcaagtcaattatcttatttttaacaaacgtgagtattttactcattttttataaaaacttttagaaatatacagactctatcgtgtgtctatatcttctttttatatccaatgtatttatgtctgatttttcttcatttatcatatataatggtccaaattctacacgtgcttcggattcatccagatcattaaggttcttataattgtaacatccttctcttccctcttctacatcttccttcttattcttattcttagcgtcacagaatctaccacagcaggatcccatgacgagcgtcatattaaactaatccattttcaattataatatacgattagtaatgaccattaaaataaaaaatattcttcataaccggcaagaaagtgaaaagttcacattgaaactatgtcagtagtatacatcatgaaatgatgatatatatatactctattttggtggaggattatatgatataattcgtggataatcattcttaagacacatttcttcattcgtaaatcttttcacgttaaatgagtgtccatattttgcaatttcttcatatgatggcggtgtacgtggacgaagctgctcctgttcttgttgtagtcgccgactgtcgtgtttgcgtttagatccctccattatcgcgattgcgtagatggagtactattatataccttgtaattaaatttttttattaattaaacgtataaaaacgttccgtatctgtatttaagagccagatttcgtctaatagaacaaatagctacagtaaaaataactagaataattgctacacccactagaaaccacggatcgtaatacggcaatcggttttcgataataggtggaacgtatattttatttaaggacttaacaattgtctgtaaaccacaatttgcttccgcggatcctgtattaactatctgtaaaagcatatgttgaccgggcggagccgaacattctccgatatctaatttctgtatatctataatattattaacctccgcatacgcattacagttcttttctagcttggataccgcactaggtacatcgtctagatctattcctatttcttcagcgatagctcttctatccttttccggaagcaatgaaatcacttcaataaatgattcaaccatgagtgtgaaactaagtcgagaattactcatgcatttgttagttattcggagcgcgcaatttttaaactgtcctataacctctcctatatgaatagcacaagtgacattagtagggatagaatgttgagctaatttttgtaaataactatctataaaaagattatacaaagttttaaactctttagtttccgccatttatccagtctgagaaaatgtctctcataataaatttttccaagaaactaattgggtgaagaatggaaacctttaatctatatttatcacagtctgttttggtacacatgatgaattcttctaatgctgtactaaattcgatatctttttcgatttctggatatgtttttaataaagtatgaacaaagaaatggaaatcgtaataccagttatgttcaactttgaaattgttttttattttcttgttaatgattccagccacttgggaaaagtcaaagtcgtttaatgccgatttaatacgttcattaaaaacaaactttttatcctttagatgaattattattggttcattggaatcaaaaagtaagatattatcgggtttaagatctgcgtgtaaaaagttgtcgcaacagggtagttcgtagattttaatgtataacagagccatctgtaaaaagataaactttatgtattgtaccaaagatttaaatcctaatttgatagctaactcggtatctactttatctgccgaatacagtgctaggggaaaaattataatatttcctctttcgtattcgtagttagttctcttttcatgttcgaaaaagtgaaacatgcggttaaaatagtttataacattaatattactgttaataactgccggataaaagtgggatagtaatttcacgaatttgatactgtcctttctctcgttaaacgcctttaaaaaaactttagaagaatatctcaatgagagttcctgaccatccatagtttgtatcaataatagcaacatatgaagaacccgtttatacagagtatgtaaaaatgttaatttatagtttaatcccatggcccacgcacacacgattaattttttttcatctccctttagattgttgtatagaaatttgggtactgtgaactccgccgtagtttccatgggactatataattttgtggcctcgaatacaaattttactacatagttatctatcttaaagactataccatatcctcctgtagatatgtgataaaaatcgtcgtttataggataaaatcgtttatccttttgttggaaaaaggatgaattaatgtaatcattctcttctatctttagtagtgtttccttattaaaattcttaaaataatttaacaatctaactgacggagcccaattttggtgtaaatctaattgggacattatgttgttaaaatacaaacagtctcctaatataacagtatctgataatctatggggagacatccattgatattcaggggatgaatcattggcaacacccatttattgtacaaaaagccccaatttacaaacgaaagtccaggtttgatagagacaaacaattaactattttgtctctgtttttaatttctttggtaatgaaattattcacaatatcagtatcttctttatctaccagagattttactaacttgataaccttggctgtctcattcaatagggtagtaatatttgtatgtgtgatattgatatctttttgaattgtttcttttagaagtgattctttgatggtgccagcatacgaattacaataatgcagaaactcagttaacatgcaggaattatagtaagccaattccaattgttgcctgtattgtattagagtattaatatgcgcaatggtgtccttgcgtttctctgatagaatgcgagcagcgattttggcgttatcatttgacgatatttctggaatgacgaatcctgtttctactaactttttggtaggacaaagtgaaacaatcaagaagatagcttctcctcctatttgtggaagaaattgaactcctctagatgatctactgacgatagtatctccttgacagatattggaccgaattacagaagtacctggaatgtaaagccctgaaaccccctcattttttaagcagattgttgccgtaaatcctgcactgtgaccaagatagagagctcctttggtgaatccatctctatgtttcagtttaaccaagaaacagtcagctggtctaaaatttccatctctatctaatacagcatctaacttgatgtcaggaactatgaccggtttaatgttatatgtaacattgagtaaatccttaagttcataatcatcactgtcatcagttatgtacgatccaaacaatgtttctactggcatagtggatacgaagatgctatccatcagaatgtttccctgattagtattttctatatagctattcttctttaaacgattttccaaatcagtaactatgttcatttttttaggagtaggacgcctagccagtatggaagaggattttctagatcctctcttcaacatctttgatctcgatggaatgcaaaaccccatagtgaaacaaccaacgataaaaataatattgtttttcactttttataattttaccatctgactcatggattcattaatatctttataagagctactaacgtataattctttataactgaactgagatatatacaccggatctatggtttccataattgagtaaatgaatgctcggcaataactaatggcaaatgtatagaacaacgaaattatactagagttgttaaagttaatattttctatgagctgttccaataaattatttgttgtaactgcgttcaagtcataaatcatcttgatactatccagtaaaccgtgtttaagttctggaatattatcatcccattgtaaagcccctaattcgactatcgaatatcctgctctgatagcagtttcaatatcgacggacgtcaatactgtaataaaggtggtagtattgtcatcatcgtgataaactacgggaatatggtcgttagtaggtacggtgactttacacaacgcgatatataactttccttttgtaccatttttaacgtagttgggacgtcctgcagggtattgttttgaagaaatgatatcgagaacagatttgatacgatatttgttggattcctgattattcactataatataatctagacagatagatgattcgataaatagagaaggtatatcgttggtaggataatacatccccattccagtattctcggatactctattgatgacactagttaagaacatgtcttctattctagaaaacgaaaacatcctacatggactcattaaaacttctaacgctcctgattgtgtctcgaatgcctcgtacaaggatttcaaggatgccatagattctttgaccaacgatttagaattgcgtttagcatctgatttttttattaaatcgaatggtcggctctctggtttgctaccccaatgataacaatagtcttgtaaagataaaccgcaagaaaatttatacgcatccatccaaataaccctagcaccatcggatgatattaatgtattattatagattttccatccacaattattgggccagtatactgttagcaacggtatatcgaatagattactcatgtaacctactagaatgatagttcgtgtactagtcataatatctttaatccaatctaagaaatttaaaattagattttttacactgttaaagttaacaaaggtattacccggatacgtggatatcatatatggcattggtccattatcagtaatagctccataaactgatacggcgatggtttttatatgtgtttgatctaacgaggaagaaattcgcgcccacaattcatctctagatatgtatttaatatcaaacggtaacacatcaatttcgggacgcgtatatgtttctaaatttttaatccaaatataatgatgacctatatgccctattatcatactgtcaactatagtacacctagagaacttacgatacatctgtttcctataatcgttaaattttacaaatctataacatgctaaaccttttgacgacagccattcattaatttctgatatggaatctgtattctcgataccgtattgttctaaagccagtgctatatctccctgttcgtgggaacgctttcgtataatatcgatcaacggataatctgaagtttttggagaataatatgactcatgatctatttcgtccataaacaatctagacataggaattggaggcgatgatcttaattttgtgcaatgagtcgtcaatcctataacttctaatcttgtaatattcatcatcgacataatactatctatgttatcatcgtatattagtataccacggccttcttcatttcgtgccaaaataatatacagtcttaaataattacgcaatatctcaatagtttcataattgttagctgttttcatcaagatttgtaccctgtttaacatgatggcgttctatacgtctctattttcttttttttaaatttttaacgatttactgtggctagatacccaatctctctcaaatatttttttagcctcgcttacaagctgtttatctatactattaaaactgacgaatccgtgattttggtaatgggttccgtcgaaatttgccgaagtgatatgaacatattcgtcgtcgactatcaacaattttgtattattctgaatagtgaaaaccttcacagatagatcattttgaacacacaacgcgtctagacttctggcggttgccatagaatatacgtcgttcttatcccaattaccaactagaagtctgatcttaactcctctattaatggctgcttctataatggagttgtaaatgtcgggccaatagtagctattaccgtcgacacgtgtagtgggaactatggccaaatgttcaatatctatactagtcttagccgacttgagtttatcaataactacatcggtatctagatctctagaatatcccaataggtgttccggagaatcagtaaagaacactccacctataggattcttaatatgatacgcagtgctaactggcaaacaacaagccgcagagcataaattcaaccatgaattttttgcgctattaaaggctttaaaagtatcaaatcttctacgaagatctgtggccagcgggggataatcagaatatacacctaacgttttaatcgtatgtatagatcctccagtaaatgacgcgtttcctacataacatctttcatcatctgacacccaaaaacaaccgagtagtagtcccacattattttttttatctatattaacggttataaaatttatatccgggcagtgactttgtagctctcccagatttcttttccctcgttcatctagcaaaactattattttaatccctttttcagatgcctcttttagtttatcaaaaataagcgctcccctagtcgtactcagaggattacaacaaaaagatgctatgtatatatatttcttagctagagtgataatttcgttaaaacattcaaatgttgttaaatgatcggatctaaaatccatattttctggtagtgtttctaccagcctacattttgctcccgcaggtaccgatgcaaatggccacatttagttaacataaaaacttatacatcctgttctatcaacgattctagaatatcatcggctatatcgctaaaattttcatcaaagtcgacatcacaacctaactcagtcaatatattaagaagttccatgatgtcatcttcgtctatttctatatccgtatccattgtagattgttgaccgattatcgagtttaaatcattactaatactcaatccttcagaatacaatctgtgtttcattgtaaatttataggcggtgtatttaagttggtagattttcaattatgtatcaatatagcaacagtagttcttgctcctccttgattctagcatcctcttcattattttcttctacgtacataagcatgtccaatacgttagacaacacaccgacgatggcggccgccacagacacgaatatgactagaccgatgaccatttaaaaacccctctctagctttcacttaaactgtatcgattattcttttagaacatgtataatataaaaacattattctatttcgaatttaggcttccaaaaatttttcatccgtaaaccgataataatatatatagacttgttaatagtcggaataaatagattaatgcttaaactatcatcatctccacgattagagatacaatatttacattttttttgctgtttcgaaactttatcaatacacgttaatacaaacccaggaaggagatattgaaactgaggctgttgaaaatgaaacggtgaatacaataattcagataatgtaaaatcatgattccgtattctgatgatattagaactgctaatggatgtcgatggtatgtatctaggagtatctattttaacaaagcatcgatttgctaatatacaattatccttttgattaattgttattttattcatattcttaaaaggtttcatatttatcaattcttctacattaaaaatttccatttttaatttatgtagcccccgcaatactcctcattacgtttcattttttgtctataatatccattttgttcatctcggtacatagattatccaattgagaagcgcatttagtagttttgtacattttaagtttattgacgaatcgtcgaaaactagttatagttaacattttattatttgataccctgatattaatacccctgccgttactattatttataactgatgtaatccacgtaacattagaattaattatcgatagtaatgcatcgacgcttccaaaattgtctattataaactcaccgataatttttttattgcatgttttcatattcattaggattatcaaatctttaatcttactacgattgtatgcgttgatattgcaagacgtcattctaaaagacggaggatctccatcaaatgccagacaatcacgtacaaagtacatggaaataggttttgttctattgcgcatcatagatttatatagaacacccgtagaaatactaatttgttttactctataaaatactaatgcatctatttcatcgttttgtataacgtctttccaagtgtcaaattccaaatttttttcattgatagtaccaaattcttctatctctttaactacttgcatagataggtaattacagtgatgcctacatgccgttttttgaaactgaatagatgcgtctagaagcgatgctacgctagtcacaatcaccactttcatatttagaatatatgtatgtaaaaatatagtagaatttcattttgtttttttctatgctataaatgaattctcattttgcatctgctcatactccgttttatatcaataccaaagaaggaagatatctggttctaaaagccgttaaagtatgcgatgttagaactgtagaatgcgaaggaagtaaagcttcctgcgtactcaaagtagataaaccctcatcgcccgcgtgtgagagaagaccttcgtccccgtccagatgcgagagaatgaataaccctggaaaacaagttccgtttatgaggacggacatgctacaaaatatgttcgcggctaatcgcgacaacgtggcgtcgagacttttgaactaaaatacaattatatccttttcgatattaataaatccgtgtcgtccaggttttttatctctttcagtatgtgaatagataggtattttatctctattcatcatcgaatttaagagatccgataaacattgtttgtattctccagatgtcagcatctgatacaacaatatatgtgcacataaacctctggcacttatttcatgtaccttccccttatcactaaggagaatagtatttgagaaatatgtatacatgatattatcatgaattagatatacagaatttgtaacactctcgaaatcacacgatgtgtcggcgttaagatctaatatatcactcgataacacattttcatctagatacactagacattttttaaagctaaaatagtctttagtagtgacagtaactatgcgattattttcatcgatgatacatttcatcggcatattattacgcttaccatcaaagactataccatgtgtatatctaacgtattctagcatggttgccatacgcgcattaaacttttcaggatctttggatagatcttccaatctatctatttgagaaaacatttttatcatgttcaatagttgaaacgtcggatccactatatagatattatctataaagattttaggaactacgttcatggtatcctggcgaatattaaaactatcaatgatatgattatcgttttcatcttttatcaccatatagtttctaagatatgggattttacttaatataatattatttcccgtgataaattttattagaaaggccaaatctataagaaaagttctagaattagtctgaagaatatctatatcgccgtaccgtatatttggattaattagatatagagaatatgatccgtaacatatacaacttttattatggcgtctaagatattcttccatcaacttattaacatttttgactagggaagatacattatgacgtcccattacttttgccttgtctattactgcgacgttcatagaatttagcatatctcttgccaattcttccattgatgttacattataagaaattttagatgaaattacatttggagctttaatagtaagaactcctaatatgtccgtgtatgtggtcactaatacagattgtagttctataatcgtaaataatttacctatattatatgtttgagtctgtttagaaaagtagctaagtatacgatcttttatttctgatgcagatgtattaacatcggaaaaaaatctttttttattcttttttactaaagatacaaatatgtctttgttaaaaacagttattttttgaatatttctagcttgtaattttaacatatgatattcgttcacactaggtactctgcctaaataggtttctataatctttaatgtaatattaggaagagtattctgatcaggattcctattcattttgaggatttaaaactctgattattgtctaatatggtctctacgcaaactttttcacagagcgatagagtttttgataactcgtttttcttaagaaatataaaactactgtctccagagctcgctctatcttttattttatttaattcgatacaaactcctgatactggttcagaaagtaattcattaattttcagtcctttatagaagatatttaatatagataatacaaaattttcagttcttgatatcgatctgattgatcctagaactagatatattaataacgtgctcattaggcagtttatggcagcttgataattagatatagtatattccagttcatatttattagataccgcattgcccagattttgatattctatgaattcctctgaaaataaatccaaaataactaaacattctattttttgtggattagtgtactctcttccctctatcatgttcactactggtgtccacgatgataaatatctagagggaatataatatagtccataggatgccaatctagcaatgtcgaataactgtaatttgattcttcgttcttcattatgaattgattcttgaggtataaacctaacacaaattatattattagacttttcgtatgtaatgtctttcatgttataagtttttaatcctggaatagaatctattttaatgaggcttttaaacgcagagttctccaacgagtcaaagcataatactctgttgtttttcttatatacgatgttacgattttcttctttgaatggaataggtttttgaattagtttataattacaacataatagataaggaagtgtgcaaatagtacgcggaaaaaacataatagctcccctgttttcatccatggttttaagtaaatgatcactggcttctttagtcaatggatattcgaacattaaccgtttcatcatcattggacagaatccatatttcttaatgtaaagagtgatcaaatcattgtgtttattgtaccatcttgttgtaaatgtgtattcggttatcggatctgctcctttttctattaaagtatcgatgtcgatctcgtctaagaattcaactatatcgacatatttcatttgtatacacataaccattactaacgtagaatgtataggaagagatgtaacgggaacagggtttgttgattcgcaaactattctaatacataattcttctgttaatacgtcttgcacgtaatctattatagatgccaagatatctatataattattttgtaagatgatgttaactatgtgatctatataagtagtgtaataattcatgtatttcgatatatgttccaactctgtctttgtgatgtctagtttcgtaatatctatagcatcctcaaaaaatatattcgcatatattcccaagtcttcagttctatcttctaaaaaatcttcaacgtatggaatataataatctattttacctcttctgatatcattaatgatatagtttttgacactatcttctgtcaattgattcttattcactatatctaagaaacggatagcgtccctaggacgaactactgccattaatatctctattatagcttctggacataattcatctattataccagaattaatgggaactattccgtatctatctaacatagttttaagaaagtcagaatctaagacctgatgttcatatattggttcatacatgaaatgatctctattgatgatagtgactatttcattctctgaaaattggtaactcattctatatatgctttccttgttgatgaaggatagaatatactcaatagaatttgtaccaacaaactgttctcttatgaatcgtatatcatcatctgaaataatcatgtaaggcatacatttaacaattagagacttgtctcctgttatcaatatactattcttgtgataatttatgtgtgaggcaaatttgtccacgttctttaattttgttatagtagatatcaaatccaatggagctacagttcttggcttaaacagatatagtttttctggaacgaattctacaacattattataaaggactttgggtagataagtgggatgaaatcctattttaattaatgcgatagccttgtcctcgtgcagatatccaaacgcttttgtgatagtatggcattcattgtctagaaacgctctacgaatatctgtgacagatatcatctttagagaatatactagtcgcgttaatagtactacaatttgtattttttaatctatctcaataaaaaaattaatatgtatgattcaatgtataactaaactactaactgttattgataactagaatcagaatctaatgatgacgtaaccaagaagtttatctactgccaatttagctgcattatttttagcatctcgtttagattttccatctgccttatcgaatactcttccgtcgatgtctacacaggcataaaatgtaggagagttactaggccccactgattcaatacgaaaagaccaatctctcctagtaatttggcagtactcattaataacggtgacagggttagcacctttccaatcaataatttttttagccggaataacatcatcaaaagacttatgatcctctctcattgatttttcgcgggatacatcatctattatgacgtcagccatagcatcagcatccggcttatccgcctccgttgtcataaaccaacgaggaggaatatcgtcggagctgtacaccatagcactacgttgaagatcgtacagagctttattaacttctcgcttctccatattaagttgtctagttagttgtgcagcagtagctccttcgattccaatggttttaatagcctcacacacaatctctgcgttagaacgctcgtcgatatagattttagacatttttagagagaactaacgcaatcagtaataaaactaatttattttatcattttttttattcatcatcctctggtggttcgtcgtttctatcgaatgtagctctgattaacccgtcatctataggtgatgctggttctggagattctggaggagatggattattatctggaagaatctctgttatttccttgttttcatgtatcgattgcgttgtaacattaagattgcgaaatgctctaaatttgggaggcttaaagtgttgtttgcaatctctacacgcgtgtctaactagtggaggttcgtcagcggctctagtttgaatcatcatcggcgtagtattcctacttttacagttaggacacggtgtattgtatttctcgtcgagaacgttaaaataatcgttgtaactcacatcctttattttatctatattgtattctactcctttcttaatgcattttataccgaataagagatagcgaaggaattctttttcggtgccgctagtacccttaatcatatcacatagtgttttatattccaaatttgtggcaatagacggtttatttctatacgatagtttgtttctggaatcctttgagtattctataccaatattattctttgattcgaatttagtttcttcgatattagattttgtattacctatattcttgatgtagtactttgatgatttttccatggcccattctattaagtcttccaagttggcatcatccacatattgtgatagtaattctcggatatcagtagcggttaccgccattgatgtttgttcattggatgagtaactactaatgtatacattttccatttataacacttatgtattaactttgttcatttatattttttcattattatgttgatattaacaaaagtgaatatatatatgttaataattgtattgtggttatacggctacaattttataattagtgaaagtcagtgtccgatgatcaatgacgatagctttactctgaaaagaaagtatcaaatcgatagtgcggagtcaacaataaaaatggataagaagaggacaaagtttcagaatagagccaaaatggtaaaagaaataaatcagacaataagagcagcacaaactcattacgagacattgaaactaggatacataaaatttaagagaatgattaggactactactctagaagatatagcaccatctattccaaataatcagaaaacttataaactattctcggacatttcagccatcggcaaagcatcacggaatccaagtaagatggtatatgctctgctgctttacatgtttcccaatttgtttggagatgatcatagattcattcgttatagaatgcatccaatgagtaaaatcaaacacaagatcttctctcctttcaaacttaatcttattagaatattagtggaagaaagattctataataatgaatgcagatctaataaatggagaataattggaacacaagttgataaaatgttgatagctgaatctgataaatatacaatagatgcaaggtataacctaaaacccatgtatagaatcaagggaaaatctgaagaagataccctctttatcaaacagatggtagaacaatgtgtgacatcccaggaattggtggaaaaagtgttgaagatactgtttagagatttgttcaagagtggagaatacaaagcgtacagatacgatgatgatgtagaaaatggatttattggattggatacactaaaattaaacattgttcatgatatagttgaaccatgtatgcctgttcgtaggccagtggctaagatactgtgtaaagaaatggtaaataaatactttgagaatccgctacatattattggtaaaaatcttcaagagtgcattgactttgttagtgaataggcatttcatctttctccaatactaattcaaattgttaaattaataatggatagtataaatagttattagtgataaaatagtaaaaataattattagaataagagtgtagtatcatagataactctcttctataaaaatggattttattcgtagaaagtatcttatatacacagtagaaaataatatagattttttaaaggatgatacattaagtaaagtaaacaattttaccctcaatcatgtactagctctcaagtatctagttagcaattttcctcaacatgttattactaaggatgtattagctaataccaatttttttgttttcatacatatggtacgatgttgtaaagtgtacgaagcggttttacgacacgcatttgatgcacccacgttgtacgttaaagcattgactaagaattatttatcgtttagtaacacaatacaatcgtacaaggaaaccgtgcataaactaacacaagatgaaaaatttttagaggttgccaaatacatggacgaattaggagaacttataggcgtaaattatgacttagttcttaatccattatttcacggaggggaacccatcaaagatatggaaatcatttttttaaaactgtttaagaaaacagacttcaaagttgttaaaaaattaagtgttataagattacttatttgggcttacctaagcaagaaagatacaggcatagagtttgcggataatgatagacaagatatatatactctatttcaacaaactggtagaatcgtccatagcaatctaacagaaacgtttagagattatatctttcccggagataagactagctattgggtgtggttaaacgaaagtatagctaatgatgcggatattgttcttaatagacacgccattaccatgtatgataaaattcttagttatatatactctgagataaaacaaggacgcgttaataaaaacatgcttaagttagtttatatctttgagcctgaaaaagatatcagagaacttctgctagaaatcatatatgatattcctggagatatcctatctattattgatgcaaaaaacgacgattggaaaaaatattttattagtttttataaagctaattttattaacggtaatacatttattagtgatagaacgtttaacgaggacttattcagagttgttgttcaaatagatcccgaatatttcgataatgaacgaattatgtctttattctctacgagtgctgcggacattaaacgatttgatgagttagatattaataacagttatatatctaatataatttatgaggtgaacgatatcacattagatacaatggatgatatgaagaagtgtcaaatctttaacgaggatacgtcgtattatgttaaggaatacaatacatacctgtttttgcacgagtcggatcccatggtcatagagaacggaatactaaagaaactgtcatctataaaatccaagagtagacggctgaacttgtttagcaaaaacattttaaaatattatttagacggacaattggctcgtctaggtcttgtgttagatgattataaaggagacttgttagttaaaatgataaaccatcttaagtctgtggaggatgtatccgcattcgttcgattttctacagataaaaaccctagtattcttccatcgctaatcaaaactattttagctagttataatatttccatcatcgtcttatttcaaaggtttttaagagataatctatatcatgtagaagaattcttggataaaagcatccatctaaccaagacggataagaaatatatacttcaattgataagacacggtagatcatagaacagaccaaatatattattaataatttgtatatacatagatataattatcacatattaaaaattcacacatttttgataaatgggaactgctgcaacaattcagactcccaccaaattaatgaataaagaaaatgcagaaatgattttggaaaaaattgttgatcatatagttatgtatattagtgacgaatcaagtgattcagaaaataatcctgaatatattgattttcgtaacagatacgaagactatagatctctcattataaaaagtgatcacgagtttgtaaagctatgtaaaaatcatgcagagaaaagttctccagaaacgcaacaaatgattatcaaacacatatacgaacaatatcttattccagtatctgaagtactattaaaacctataatgtccatgggtgacataattacatataacggatgtaaagacaatgaatggatgctagaacaactctctaccctaaactttaacaatctccgcacatggaactcatgtagcataggcaatgtaacgcgtctgttttatacattttttagttatctgatgaaagataaactaaatatataagtataatcccattctaatactttaacctgatgtattagcatcttattagaatattaacctaactaaaagacataacataaaaactcattacatagttgataaaaagcggtaggatataaatattatggctgccaccgttccgcgttttgacgacgtgtacaaaaatgcacaaagaagaattctagatcaagaaacattttttagtagaggtctaagtagaccgttaatgaaaaacacatatctatttgataattacgcgtatggatggataccagaaactgcaatttggagtagtagatacgcaaacttagatgcaagtgactattatcccatttcgttgggattacttaaaaagttcgagtttctcatgtctctatataaaggtcctattccagtatacgaagaaaaagtaaatactgaattcattgctaatggatcgttctctggtagatacgtatcatatcttcgaaagttttctgctcttccaacaaacgagtttattagttttttgttactgacttccattccaatctataatatcttgttctggtttaaaaatactcagtttgatattactaaacacacattattcagatacgtctatacagataatgccaaacacctggcgttggctaggtatatgcatcaaacaggagactataagcctttgtttagtcgtctcaaagagaattatatatttaccggtcccgttccaataggtatcaaagatataaatcaccctaatcttagtagagcaagaagtccatccgattatgagacattagctaatattagtactatattgtactttaccaagtatgatccggtattaatgtttttattgttttacgtacctgggtattcaattactacaaaaattactccagccgtagaatatctaatggataaactgaatctaacaaagagcgacgtacaactgttgtaaattattttatgcttcgtaaaatgtaggttttgaaccaaacattctttcaaagaatgagatgcataaaactttattatccaatagattgactatttcggacgtcaatcgtttaaagtaaacttcgtaaaatattctttgatcactgccgagtttaaaacttctatcgataattgtttcatatgttttaatatttacaagttttttggtccatggtacattagccggacaaatatatgcaaaataatatcgttctccaagttctatagtttctggattatttttattatattcagtaaccaaatacatattagggttatctgcggatttataatttgagtgatgcattcgactcaacataaataattctagaggagacgatctactatcaaattcggatcgtaaatctgtttctaaagaacggagaatatctatacatacctgattagaattcatccgtccttcagacaacatctcagacagtctggtcttgtatgtcttaatcatattcttatgaaacttggaaacatctcttctagtttcactagtacctttattaattctctcaggtacagattttgaattcgacgatgccgagtatttcatcgttgtatatttcttcttcgattgcataatcagattcttatataccgcctcaaactctattttaaaattattaaacaatactctattattaatcagtcgttctaactcctttgctatttctatggacttatctacatcttgactgtctatctctgtaaacacggagtcggtatctccatacacgctacgaaaacgaaatctgtaatctataggcaacgatgttttcacaatcggattaatatctctatcgtccatataaaatggattacttaatggattggcaaaccgtaacataccgttagataactctgctccatttagtaccgattctagatacaagatcattctacgtcctatggatgtgcaactcttagccgaagcgtatgagtatagagcactatttctaaatcccatcagaccatatactgagttggctactatcttgtacgtatattgcatggaatcatagatggccttttcagttgaactggtagcctgttttaacatctttttatatctggctctctctgccaaaaatgttcttaatagtctaggaatggttccttctatcgatctatcgaaaattgctatttcagagatgaggttcggtagtctaggttcacaatgaaccgtaatatatctaggaggtggatatttctgaagcaagagctgattatttatttcttcttccaatctattggtactaacaacgacaccgactaatgtttccggagatagatttccaaagatacacacattaggatacagactgttataatcaaagattaatacattattactaaacattttttgttttggagcaaataccttaccgccttcataaggaaacttttgttttgtttctgatctaactaagatagttttagtttccaacaatagctttaacagtggacccttgatgactgtactcgctctatattcgaataccatggattgaggaagcacatatgttgacgcacccgcgtctgtttttgtttctactccataatactcccacaaatactgacacaaacaagcatcatgaatacagtatctagccatatctaaagctatgtttagattataatccttatacatctgagctaaatcaacgtcatcctttccgaaagataatttatatgtatcattaggtaaagtaggacataatagtacgactttaaatccattttcccaaatatctttacgaattactttacatataatatcctcatcaacagtcacataattacctgtggttaaaacctttgcaaatgcagcggctttgcctttcgcgtccgtagtatcgtcaccgatgaacgtcatttctctaactcctctatttaatactttacccatgcaactgaacgcgttcttggatatagaatccaatttgtacgaatccaatttttcagatttttgaatgaatgaatatagatcgaaaaatatagttccattattgttattaacgtgaaacgtagtattggccatgccgcctactcccttatgactagactgatttctctcataaatacagagatgtacagcttcctttttgtccggagatctaaagataatcttctctcctgttaataactctagacgattagtaatatatctcagatcaaagttatgtccgttaaaggtaacgacatagtcgaacgttagttccaacaattgtttagctattcgtaacaaaactatttcagaacataaaactagttctcgttcgtaatccatttccattagtgactgtatcctcaaacatcctctatcgacggcttcttgtatttcctgttccgttaacatctcttcattaatgagcgtaaacaataatcgtttaccacttaaatcgatataacagtaacttgtatgcgagattgggttaataaatacagaaggaaacttcttatcgaagtgacactctatatctagaaataagtacgatcttgggatatcgaatctaggtatttttttagcgaaacagttacgtggatcgtcacaatgataacatccattgttaatctttgtcaaatattgctcgtccaacgagtaacatccgtctggagatatcccgttagaaatataaaaccaactaatattgagaaattcatccatggtggcattttgtatgctgcgtttctttggctcttctatcaaccacatatctgcgacggagcattttctatctttaatatctagattataacttattgtctcgtcaatgtctatagttctcatctttcccaacggcctcgcattaaatggaggaggagacaatgactgatatatttcgtccgtcactacgtaataaaagtaatgaggaaatcgtataaatacggtctcaccatttcgacatctggatttcagatataaaaatctgttttcaccgtgactttcaaaccaattaatgcaccgaacatccatttatagaatttagaaatatattttcatttaaatgaatcccaaacattggggaagagccgtatggaccattatttttatagtactttcgcaagcgggtttagacggcaacatagaagcgtgtaaacgaaaactatatactatagttagcactcttccatgtcctgcatgtagacggcacgcgactatcgctatagaggacaataatgtcatgtctagcgatgatctgaattatatttattattttttcatcagattatttaacaatttggcatctgatcccaaatacgcgatcgatgtgacaaaggttaaccctttataaacttaacccattataaaacttatgattagtcacgactgaaataaccgcgtgattattttttggtataattctacacggcatggtttctgtgactatgaattcaacccccgttacattagtgaaatctttaacaaacagcaagggttcgtcaaagacataaaactcattgtttacaatcgaaatagaccccctatcacacttaaaataaaaaatatccttatcctttaccaccaaataaaattctgattggtcaatgtgaatgtattcacttaacagttccacaaatttatttattaactccgaggcacatacatcgtcggtattttttatggcaaactttactcttccagcatccgtttctaaaaaaatattaacgagttccatttatatcatccaatattattgaaatgacgttgatggacaaatgatacaaataagaaggtacggtacctttgtccaccatctcctccaattcatgctctattttgtcattaactttaatgtatgaaaacagtacgccacatgcttccatgacagtgtgtaacactttggatacaaaatgtttgacattagtataattgttcaagactgtcaatctataatagatagtagctataatatattctatgatggtattgaagaagatgacaaccttggcatattgatcatttaacacagacatggtatcaacagatagcttgaatgaaagagaatcagtaattggaataagcgtcttctcgatggagtgtccgtataccaacatgtctgatattttgatgtattccattaaattatttagttttttctttttattctcgttaaacagcatttctgtcaacggaccccaacatcgttgaccgattaagttttgattgatttttccgtgtaaggcgtatctagtcagatcgtatagcctatccaataatccatcgtctgtgtgtagatcacatcgtacactttttaattctctatagaagagcgacagacatctggagcaattacagacagcaatttctttattctctacagatgtaagatacttgaagacattcctatgatgatgcagaattttggataacacggtattgatggtatctgttaccataattcctttgatggctgatagtgtcagagcacaagatttccaatctttgacaatttttagcaccattatctttgttttgatatctatatcagacagcatggtgcgtctgacaacacaaggattaagacggaaagatgaaatgattctctcaacatcttcaatggataccttgctattttttctggcattatctatatgtgcgagaatatcctctagagaatcagtatcctttttgatgatagtggatctcaatgacatgggacgtctaaaccttcttattctatcaccagattgcatggtgatttgtcttctttcttttatcataatgtaatctctaaattcatcggcaaattgtctatatctaaaatcataatatgagatgtttacctctacaaatatctgttcgtccaatgttagagtatttacatcagttttgtattccaaattaaacatggcaacggatttaattttatattcctctattaagtcctcgtcgataataacagaatgtagataatcatttaatccatcgtacatggttggaagatgctcgttgacaaaatctttaattgtcttgatgaaggtgggactatatctaacatcttgattaataaaatttataacattgtccataggatactttgtaactagttttatacacatctcttcatcggtaagtttagacagaatatcgtgaacaggtggtatattatattcatcagatatacgaagaacaatgtccaaatctatattgtttaatatattatatagatgtagtgtagctcctacaggaatatctttaactaagtcaatgatttcatcaaccgttagatctattttaaagttaatcatataggcattgatttttaaaaggtatgtagccttgactacattctcattaattaaccattccaagtcactgtgtgtaagaagattatattctatcataagcttgactacatttggtcccgataccattaaagaattcttatgatataaggaaacagattttaggtactcatctactctacaagaattttggagagccttaacgatatcagtgacgtttattatttcaggaggaaaaaacctaacattgagaatatcggaattaatagcttccagatacagtgattttggcaatagtccgtgtaatccataatccagtaacacgagctggtgcttgctagacaccttttcaatgtttaatttttttgaaataagctttgataaagccttcctcgcaaattccggatacatgaacatgtcggcgacatgattaagtattgttttttcattatttttatattttctcaacaagttctcaataccccaatagatgatagaatatcacccaatgcgtccatgttgtctatttccaacaggtcgctatatccaccaatagaagttttcccaaaaaagattctaggaacagttctaccaccagtaatttgttcaaaatagtcacgcaattcattttcgggtttaaattctttaatatcgacaatttcatacgctcctcttttgaaactaaacttatttagaatatccagtgcatttctacaaaaaggacatgtatacttgacaaaaattgtcactttgttattggccaacctttgttgtacaaattcctcggccattttaatatttaagtgatataaaactatctcgacttatttaactctttagtcgagatatatggacgcagatagctatatgatagccaactacagaaggcaaacgctataaaaaacataattacgacgagcatatttataaatatttttattcagcattacttgatatagtaatattaggcacagtcaaacattcaaccactctcgatacattaactctctcattttctttaacaaattctgcaatatcttcgtaaaaagattcttgaaactttttagaatatctatcgactctagatgaaatagcgttcgtcaacatactatgttttgtatacataaaggcgcccattttaacagtttctagtgacaaaatgctagcgatcctaggatcctttagaatcacatagattgacgattcgtctctcttagtaactctagtaaaataatcatacaatctagtacgcgaaataatattatccttgacttgaggagatctaaacaatctagttttgagaacatcgataagttcatcgggaatgacatacatactatctttaatagaactcttttcatccagttgaatggattcgtccttaaccaactgattaatgagatcttctattttatcattttccagatgatatgtatgtccattaaagttaaattgtgtagcgcttctttttagtctagcagccaatactttaacatcactaatatcgatatacaaaggagatgatttatctatggtattaagaattcgtttttcgacatctgtcaaaaccaattcctttttgcctgtatcatccagttttccatcctttgtaaagaaattattttctactagactattaataagactgataaggattcctccataattgcacaatccaaactttttcacaaaactagactttacaagatctacaggaatgcgtacttcaggtttcttagcttgtgattttttcttttgtggacattttcttgtgaccaactcatctaccatttcattgattttagcagtgaaataagctttcaatgcacgggcactgatactattgaaaacgagttgatcttcaaattccgccatttaagttcaccaaacaacttttaaatacaaatatatcaatagtagtagaataagaactataaaaaaaataataattaaccaataccaaccccaacaaccggtattattagttgatgtgactgttttctcatcacttagaacagatttaacaatttctataaagtctgtcaaatcatcttccggagaccccataaatacaccaaatatagcggcgtacaacttatccatttatacattgaatattggcttttctttatcgctatcttcatcatattcatcatcaatatcaacaagtcccagattacgagccagatcttcttctacattttcagtcattgatacacgttcactatctccagagagtccgataacgttagccaccacttctctatcaatgattagtttcttgagtgcgaatgtaatttttgtttccgttccggatctatagaaaactacaggtgtgataattgccttggccaattgtctttctcttttactgagtgattctagttcaccttctatagatctgagaatggatgattctccagtcgaaacatattctaccatggctccgtttaatttgttgatgaagatggattcatccttaaatgttttctctgtaatagtttccaccgaaagactatgcaaagaatttggaatgcgttccttgtgcttaatgtttccatagacggcttctagaagttgatacaacataggactagccgcggtaacttttatttttagaaagtatccatcgcttctatcttgtttagatttatttttataaagtttagtctctccttccaacataataaaagtggaagtcatttgactagataaactatcagtaagttttatagagatagacgaacaattagcgtattgagaagcatttagtgtaacgtattcgatacattttgcattagatttactaatcgattttgcatactctataacacccgcacaagtctgtagagaatcgctagatgcagtaggtcttggtgaagtttcaactctcttcttgattaccttactcatgattaaacctaaataattgtactttgtaatataatgatatatattttcactttatctcatttgagaataaaaatgtttttgtttaaccactgcatgatgtacagatttcggaatcacaaaccaccggtggttttattttatccttgtccaatgtgaattgaatgggagcggatgcgggtttcgtacgtagatagtacattcccgtttttagaccgagactccatccgtaaaaatgcatactcgttagtttggaataactcggatctgctatatggatattcatagattgactttgatcgatgaaggctcccctgtctgcagccatttttatgatcgtcttttgtggaatttcccaaatagttttataaactcgcttaatatcttctggaaggtttgtattctgaatggatccaccatctgccataatcctattcttgatctcatcattccataattttctctcggttaaaactctaaggagatgcggattaactacttgaaattctccagacaatactctccgagtgtaaatattactggtatacggttccaccgactcattatttcccaaaatttgagcagttgatgcagtcggcataggtgccaccaataaactatttctaagaccgtatgttctgattttatcttttagaggttcccaattccaaagatccgacggtacaacattccaaagatcatattgtagaataccgttactggcgtacgatcctacatatgtatcgtatggtccttccttctcagctagttcacaactcgcctctaatgcaccgtaataaatggtttcgaagatcttcttatttagatcttgtgcttccaggctatcaaatggataatttaagagaataaacgcgtccgctaatccttgaacaccaataccgataggtctatgtctcttattagagatttcagcttctggaataggataataattaatatctataattttattgagatttctgacaattactttgaccacatccttcagtttgagaaaatcaaatcgcccatctattacaaacatgttcaaggcaacagatgccagattacaaacggctacctcattagcatccgcatattgtattatctcagtgcaaagattactacacttgatagttcctaaattttgttgattactctttttgttacacgcatccttataaagaatgaatggagtaccagtttcaatctgagattctataatcgctttccagacgactcgagcctttattatagatttgtatctcctttctctttcgtatagtgtatacaatcgttcgaactcgtctccccaaacattgtccaatccaggacattcatccggacacatcaacgaccactctccgtcatccttcactcgtttcataaagagatcaggaatccaaagagctataaatagatctctggttctatgttcctcgtttcctgtattctttttaagatcgaggaacgccataatatcagaatgccacggttccaagtatatggccataactccaggccgtttgtttcctccctgatctatgtatctagcggtgttattataaactctcaacattggaataataccgtttgatataccattggtaccggagatatagcttccactggcacgaatattactaattgatagacctattccccctgccattttagagattaatgcgcatcgttttaacgtgtcatagataccctctatgctatcatcgatcatgttaagtagaaaacagctagacatttggtgacgactagttcccgcattaaataaggtaggagaagcgtgcgtaaaccatttttcagaaagtagattgtacgtctcaatagctgagtctatatcccattgatgaattcctactgcgacacgcattaacatgtgctgaggtctttcaacgatcttgttgtttattttcaacaagtaggatttttccaaagttttaaaaccaaaatagttgtatgaaaagtctcgttcgtaaataataaccgagttgagtttatccttatatttgttaactatatccatggtgatacttgaaataatcggagaatgtttcccatttttaggattaacatagttgaataaatcctccatcacttcactaaatagtttttttgtttccttgtgtagatttgatacggctattctggcggctagaatggcataatccggatgttgtgtagtacaagtggctgctatttcggctgccagagtgtccaattctaccgttgttactccattatatattccttgaataaccttcatagctattttaataggatctatatgatccgtgtttaagccataacataattttctaatacgagacgtgattttatcaaacatgacattttccttgtatccatttcgtttaatgacaaacatttttgttggtgtaataaaaaaattatttaacttttcattaatagggatttgacgtacgtagcgtacaaaatgattgttcctggtatatagataaagagtcctatatatttgaaaatcgttacggctcgattaaactttaatgattgcatagtgaatatatcattaggatttaactccttgactatcagggcggcaccagaaattaccatcaaaagcattaatacagttatgcctatcgcagttagaacggttatagcatccaccatttatatctaaaaattagatcaaagaatatgtgacaaagtcctagttgtatattgagaattgacaaaacaatgtttcttacatattttttttttattagtaaccgacttaatagtaggaactggaaaactagacttgattattctataagtatagatacccttccaaataatattctctttgataaaagttccagaaaatgtagaattttttaaaaagttatcttttgctattaccaagattgtgtttagacgcttattattaatatgagtgatgaaatccacaccgcctctagatatcgcctttatttccacattagatggtaaatccaatagtgaaactatctttttaggaatgtatggactcgcgtttagaggagtgaacgtcttgggcgtcggaaaggatgattcgtcaaacgaataaacaatttcacaaatggatgttaatgtattagtaggaaattttttgacgctagtggaattgaaaattctaatggatgatgttctacctatttcatccgataacatgttaatttccgacaccaacggttttaatatttcgatgatatacggtagtctctctttcggacttatatagcttattccacaatacgagtcattatatactccaaaaaacaaaataactagtataaaatctgtatcgaatgggaaaaacgaaattatcgacataggtatagaatccggaacattgaacgtattaatacttaattctttttctgtggtaagtaccgataggttattgacattgtatggttttaaatattctataacttgagacttgatagatattagtgatgaattgaaaattatttttatcaccacgtgtgtttcaggatcatcgtcgacgcccgtcaaccaaccgaacggagtaaaataaatatcattaatatatgctctagatattagtatttttatcaatcctttgattatcatcttctcgtaggcgaatgattccatgatcaagagtgatttaagaacatcctccggagtattaatgggcttagtaaacagtccatcgttgcaataataaaagttatccaagttaaaggatattatgcattcgtttaaagatatcacctcatctgacggagacaattttttggtaggttttagagactttgaagctacttgtttaacaaagttattcatcgtcgtttactattctatttaattttgtagttaatttatcacatatcacattaattgactttttggtccatttttccatacgtttatattcttttaatcctgcgttatccgtttccgttatatccagtgatagatcgtgcaggttaaatagaatgctcttaaataatgtcatttttttatccgctaaaaatttaaagaatgtataaacttttttcaaagatttaaaacttttaggtggtgtcctagtacacaatatcataaacaaactaataaacatcccgcattcagattccaacagctgattaacttccacattaatacagcctattttcgctccaaatgtacattcgaaaaatctgaataaaacatcaatgtcgcaatttgtattatccaatacagaatgtttgtgattcgtgttaaaaccatcggagaaggaatagaaataaaaattattatagtggtggaattcagttggaatattgcctccggagtcataaaaggatactaaacattgttttttatcataaattacacatttccaatgagacaaataacaaaatccaaacattacaaatctagaggtagaacttttaattttgtctttaagtatatacgataagatatgtttattcataaacgcgtcaaatttttcatgaatcgctaaggagtttaagaatctcatgtcaaattgtcctatataatccacttcggatccataagcaaactgagagactaagttcttaatacttcgattgctcatccaggctcctctctcaggctctattttcatcttgacgacctttggattttcaccagtatgtattcctttacgtgataaatcatcgattttcaaatccatttgtgagaagtctatcgccttagatactttttcccgtagtcgaggtttaaagaaatacgctaacggtatactagtaggtaactcaaaaacatcatatatagaatggtaacgcgtctttaactcgtcggttaactctttcttttgatcgagttcgtcgctactattgggtctgctcaggtgccccgactctactagttccaacatcataccgataggaatacaagacactttgccggcggttgtagatttatcatatttttccactacatatccgttacaatttgttaaaaatttagatacatctatattgctacataatccagctagtgaatatatatgacataataaattggtaaatcctagttctggtattttactaattactaaatctgtatatctttccatttatcatggaaaagaatttaccagatatcttcttttttccaaactgcgttaatgtattctcttacaaatattcacaagatgaattcagtaatatgagtaaaacggaacgtgatagtttctcattggccgtgtttccagttataaaacatagatggcataacgcacacgttgtaaaacataaaggaatatacaaagttagtacagaagcacgtggaaaaaaagtatctcctccatcactaggaaaacccgcacacataaacctaaccgcgaagcaatatatatacagtgaacacacaataagctttgaatgttatagttttctaaaatgtataacaaatacagaaatcaattcgttcgatgagtatatattaagaggactattagaagctggtaatagtttacagatattttccaattccgtaggtaaacgaacagatactataggtgtactagggaataagtatccatttagcaaaattccattggcctcattaactcctaaagcacaacgagagatattttcagcgtggatttctcatagacctgtagttttaactggaggaactggagtgggtaagacgtcacaggtacccaagttattgctttggtttaattatttatttggtggattctctactctagataaaatcactaactttcacgaaagaccagtcattctatctcttcctaggatagctttagttagattgcatagcaataccattttaaaatcattgggatttaaggtactagatggatctcctatttctttacggtacggatctataccggaagaattaataaacaaacaaccaaaaaaatatggaattgtattttctacccataagttatctctaacaaaactatttagttatggcactcttattatagacgaagttcatgagcatgatcaaataggagatattattatagcagtagcgagaaagcatcatacgaaaatagattctatgtttttaatgactgccacgttagaggatgaccgagaacggctaaaagtatttttacctaatcccgcatttatacatattcctggagatacactgtttaaaattagcgaggtatttattcataataagataaatccatcttccagaatggcatacatagaagaagaaaagagaaatttagttactgctatacagatgtatactcctcctgatggatcatccggtatagtctttgtggcatccgttgcacagtgtcacgaatataaatcatatttagaaaaaagattaccgtatgatatgtatattattcatggtaaggtcttagatatagacgaaatattagaaaaagtgtattcatcacctaatgtatcgataattatttctactccttatttggaatccagcgttactatacgcaatgttacacacatttatgatatgggtaaagtttttgtccccgctccttttggaggatcgcaagaatttatttctaaatctatgagagatcaacgaaaaggaagagtaggaagagttaatcctggtacatacgtctatttctatgatctgtcttatatgaagtctatacagcgaatagattcagaatttctacataattatatattgtacgctaataagtttaatctaacactccccgaagatttgtttataatccctacaaatttggatattctatggcgtacaaaggaatatatagactcgttcgatattagtacagaaacatggaataaattattatccaattattatatgaagatgatagagtatgctaaactttatgtactaagtcctattctcgctgaggagttggataactttgagaggacgggagaattaactagtattgtacgagaagccattttatctctaaatttacgaattaagattttaaattttaaacataaagatgatgatacgtatatacacttttgtaaaatattattcggtgtctataacggaacaaacgctactatatattatcatagacctctaacgggatatatgaatatgatttcagatactatatttgttcctgtagataataactaaaaatcaaactctaatgaccacatctttttttagagatgaaaaattttctacatctccttttgtagacacgactaaacattttgcaaaaaaaagtttattagtgtttagataatcgtatacttcatcagtgtagatagtaaatgtgaacaaataaaaggtattcttactcaatagattggtaaattccatagaatatattaatcctttcttcttgagatcccacatcatttcaaccagagacgttttatccaatgatttacctcgtactataccacatacaaaactagattttgcagtgacgtcgtacctggtattcctaccaaacaaaattttacttttagttcttttagaaaattctaaggtagaatctctatttgccaatatgtcatctatggaattaccactagcaaaaaatgatagaaatatatattgatacatcgcagctggttttgatctactatactttaaaaacgaatcagattccataattgcctgtatatcatcagctgaaaaactatgttttacacgtattccttcggcatttctttttaatgatatatcttgtttagacaatgataaagttatcatgtccatgagagacgcgtctccgtatcgtataaatatttcattagatgttagacgcttcattaggggtatacttctataaggtttcttaatcagtccatcattggttgcgtcaagaactactatcggatgttgttgggtatctctagtgttacacatggccttactaaagtttgggtaaataactatgatatctctattaattatagatgcatatatttcattcgtcaaggatattagtatcgacttgctatcgtcattaatacgtgtaatgtaatcatataaatcatgcgatagccaaggaaaattcaaatagatgttcatcatataatcgtcgctataattcatattaatacgttgacattgactaatttgtaatatagcctcgccacgaagaaagctctcgtattcagtttcatcgataaaggataccgttaaatataactggttgccgatagtctcatagtctattaagtggtaagtttcgtacaaatacagaatccctaaaatattatctaatgttggattaatctttaccataactgtataaaatggagacggagtcataactattttaccgtttgtacttactggaatagacgaaggaataatctccggacatgctggtaaagacccaaatgtctgtttgaagaaatccaatgttccaggtcctaatctcttaacaaaaattacgatattcgatcccgatatcctttgcattctatttaccagcatatcacgaactatattaagattatctatcatgtctattctcccaccgttatataaatcgcctccgctaagaaacgttagtatatccatacaatggaatacttcatttctaaaatagtattcgttttctaattctttaatgtgaaatcgtatactagaaagggaaaaattatctttgagttttccgttagaaaagaaccacgaaactaatgttctgattgcgtccgattccgttgctgaattaatggatttacaccaaaaactcatataacttctagatgtagaagcattcgctaaaaaattagtagaatcaaaggatataagtagatgttccaacaagtgagcaattcccaagatttcatctatatcattctcgaatccgaaattagaaattcccaagtagatatcctttttcatccgatcgttgatgaaaatacgaactttattcggtaagacaatcatttactaaggagtaaaataggaagtaatgttcgtatgtcgttatcatcgtataaattaaaggtgtgttttttaccattaagtgacattataattttaccaatattggaattataatataggtgtatttgcgcactcgcgacggttgatgcatcggtaaatatagctgtatctaatgttctagtcggtatttcatcatttcgctgtctaataatagcgttttctctatctgtttccattacagctgcctgaagtttattggtcggataatatgtaaaataataagaaatacatacgaataacaaaaataaaataagatataataaagatgccatttagagatctaattttgttcaacttgtccaaattcctacttacagaagatgaggaatcgttggagatagtgtcttccttatgtagaggatttgaaatatcttatgatgacttgataacttactttccagataggaaataccataaatatatttctaaagtatttgaacatgtagatttatcggaggaattaagtatggaattccatgatacaactttgcgagatttagtctatcttagattgtacaagtattccaagtgtatacggccgtgttataaattaggagataatctaaaaggcatagttgttataaaggacaggaatatttatattagggaagcaaatgatgacttgatagaatatctcctcaaggaatacactcctcagatttatacatattctaatgagcgcgtccccataactggttcaaaattaattctttgtggattttctcaagttacatttatggcgtatacaacgtcgcatataacaacaaataaaaaggtagatgttctcgtttccaaaaaatgtatagatgaactagtcgatccaataaattatcaaatacttcaaaatttatttgataaaggaagcggaacaataaacaaaatactcaggaagatattttattcggtaacaggtggccaaactccataggtagctttttctatttcggattttagaatttccaaattcaccagcgatttatctgttttggtgaaatccaaggatttattaatgtccacaaatgccatttgttttgtctgtggattgtatttgaaaatggaaacgatgtagttagatagatgcgctgcgaagtttcctattagggttccgcgcttcacgtcacccagcatacttgaatcaccatcctttaaaaaaaatgataagatatcaacatggagtatatcatactcggattttaattcttctactgcatcactgacattttcacaaatactacaatacggtttaccgaaaataatcagtacgttcttcatttatgggtatcaaaaacttaaaatcgttactgctggaaaataaatcactgacgatattagatgataatttatacaaagtatacaatggaatatttgtggatacaatgagtatttatatagccgtcgccaattgtgtcagaaacttagaagagttaactacggtattcataaaatacgtaaacggatgggtaaaaaagggagggcatgtaaccctttttatcgatagaggaagtataaaaattaaacaagacgttagagacaagagacgtaaatattctaaattaaccaaggacagaaaaatgctagaattagaaaagtgtacatccgaaatacaaaatgttaccggatttatggaagaagaaataaaggcagaaatgcaattaaaaatcgataaactcacatttcaaatatatttatctgattctgataacataaaaatatcattgaatgagatactaacacatttcaacaataatgagaatgttacattattttattgtgatgaacgagacgcagaattcgttatgtgtctcgaggctaaaacacatttctctaccacaggagaatggccgttgataataagtaccgatcaggatactatgctatttgcatctgctgataatcatcctaagatgataaaaaacttaactcaactgtttaaatatgttccatctgcagaggataactatttagcaaaattaacggcgttagtgaatggatgtgatttctttcctggactctatggggcatctataacacccaacaacttaaacaaaatacaattgtttagtgattttacaatcgataatatagtcactagtttggcaattaaaaattattatagaaagactaactctaccgtagacgtgcgtaatattgttacgtttataaacgattacgctaatttagacgatgtctactcgtatattcctccttgtcaatgcactgttcaagaatttatattttccgcattagatgaaaaatggaatgaatttaaatcatcttatttagaaagcgtgccgttaccctgccaattaatgtatgcgttagaaccacgcaaggagattgatgtttcagaagttaaaactttatcatcttatatagatttcgaaaatactaaatcagatatcgatgttataaaatctatatcctcgatcttcggatattctaacgaaaactgtaacacgatagtattcggcatctataaggataatttactactgagtataaatagttcattttactttaacgatagtctgttaataaccaatactaaaagtgataatataataaatataggttactagattaaaaatggtgttccaactcgtgtgctctacgtgcggcaaagatatttctcacgaacgatataaattgattatacgaaaaaaatcattaaaggatgtactcgtcagtgtaaagaacgaatgttgtaggttaaaattatctacacaaatagaacctcaacgtaacttaacagtgcaacctctattggatataaactaatatggatccggttaattttatcaagacatatgcgcctagaggttctattatttttattaattataccatgtcattaacaagtcatttgaatccatcgatagaaaaacatgtgggtatttattatggtacgttattatcggaacacttggtagttgaatcaacatatagaaaaggagttcgaatagtcccattggatagtttttttgaaggatatcttagtgcaaaagtatacatgttagagaatattcaagttatgaaaatagcagctgatacgtcattaactttattgggtattccgtatggatttggtcatgatagaatgtattgttttaaattggtagctgactgttataaaaatgccggtattgatacatcgtctaaacgaatattaggtaaagatatttttctgagccaaaacttcacagacgataatagatggataaagatatatgattctaataatttaacattttggcaaattgattaccttaaagggtgagttaatatgcataactactcctccgttgttttttccctcgttctttttcttaacgttgtttgccatcactctcataatgtaaagatattctaaaatggtaaacttttgcatatcggacgcagaaattggtataaatgttgtaattgtattatttcccgtcaatggactagtcacagctccatcagttttatatcctttagagtatttctcactcgtgtctaacattctagagcattccatgatctgtttatcgttgatattggccggaaagatagattttttattttttattatattactattggcaattgtagatataacttctggtaaatatttttctaccttttcaatctcttctattttcaagccggctatatattctgctatattgttgctagtatcaataccttttctggctaagaagtcatatgtggtattcactatatcagttttaactggtagttccattagcctttccacttctgcagaataatcagaaattggttctttaccagaaaatccagctactataataggctcaccgatgatcattggcaaaatcctatattgtaccagattaatgagagcatatttcatttccaataattctgctagttcttgagacattgatttatttgatgaatctagttggttctctagatactctaccatttctgccgcatacaataacttgttagataaaatcagggttatcaaagtgtttagcgtggctagaatagtgggcttgcatgtattaaagaatgcggtagtatgagtaaaccgttttaacgaattatatagtctccagaaatctgtggcgttacatacatgagccgaatgacatcgaagattgtccaatatttttaatagctgctctttgtccattatttctatatttgactcgcaacaattgtagataccattaatcaccgattcctttttcgatgccggacaatagcacaattgtttagctttggactctatgtattcagaattaatagatatatctcttaatacagattgcactatacattttgaaactatgtcaaaaattgtagaacgacgctgttctgcagccatttaactttaaataatttacaaaaatttaaaatgagcatccgtataaaaatcgataaactgcgccaaattgtggcatatttttcagagttcagtgaagaagtatctataaatgtagactcgacggatgagttaatgtatatttttgccgccttgggcggatctgtaaacatttgggccattatacctctcagtgcatcagtgttctaccgcggagccgaaaatattgtgtttaatcttcctgtgtccaaggtaaaatcgtgtttgtgtagttttcacaatgatgccatcatagatatagaacctgatctggaaaataatctagtaaaactttctagttatcatgtagtaagtgtcgattgtaataaggaactgatgcctattaggacagatactactatttgtctaagtatagatcaaaagaaatcttacgtgtttaattttcacaagtatgaagaaaaatgttgtggtagaaccgtcattcatttagaatggttgttgggctttatcaagtgtattagtcagcatcagcatttggctattatgtttaaagatgacaatattattatgaagactcctggtaatactgatgcattttccagggaatattctatgactgaatgttctcaagaactacaaaagttttctttcaaaatagctatctcgtctctcaacaaactacgaggattcaaaaagagagtcaatgtttttgaaactagaatcgtaatggataatgacgataacattttaggaatgttgttttcggatagagttcaatcctttaagatcaacatctttatggcgtttttagattaatactttcaatgagataaatatgggtggcggagtaagtgttgagctccctaaacgggatccgcctccgggagtacccactgatgagatgttattaaacgtggataaaatgcatgacgtgatagctcccgctaagcttttagaatatgtgcatataggaccactagcaaaagataaagaggataaagtaaagaaaagatatccagagtttagattagtcaacacaggacccggtggtctttcggcattgttaagacaatcgtataatggaaccgcacccaattgctgtcgcacttttaatcgtactcattattggaagaaggatggaaagatatcagataagtatgaagagggtgcagtattagaatcgtgttggccagacgttcacgacaccggaaaatgcgatgttgatttattcgactggtgtcagggggatacgttcgatagaaacatatgccatcagtggatcggttcagcctttaataggagtaatagaactgtagagggtcaacaatcgttaataaatctgtataataagatgcaaacattatgtagtaaagatgctagtgtaccaatatgtgaatcatttttgcatcatttacgcgcacacaatacagaagatagcaaagagatgatcgattatattctaagacaacagtctgcggactttaaacagaaatatatgagatgtagttatcccactagagataagttagaagagtcattaaaatatgcggaacctcgagaatgttgggatccagagtgttcgaatgccaatgttaatttcttgctaacacgtaattataataatttaggactttgcaatattgtacgatgtaatactagcgtgaacaacttacagatggataaaacttcctcattaagattgtcatgtggattaagcaatagtgatagattttctactgttcccgtcaatagagcaaaagtagttcaacataatattaaacactcgttcgacctaaaattgcatttgatcagtttattatctctcttggtaatatggatactaattgtagctatttaaatgggtgccgcggcaagcatacagacgacggtgaatacactcagcgaacgtatctcgtctaaattagaacaagaagcgaatgctagtgctcaaacaaaatgtgatatagaaatcggaaatttttatatccgacaaaaccatggatgtaacctcactgttaaaaatatgtgctctgcggacgcggatgctcagttggatgctgtgttatcagccgctacagaaacatatagtggattaacaccggaacaaaaagcatacgtgccagctatgtttactgctgcgttaaacattcagacgagtgtaaacactgttgttagagattttgaaaattatgtgaaacagacttgtaattctagcgcggtcgtcgataacaaattaaagatacaaaacgtaatcatagatgaatgttacggagccccaggatctccaacaaatttggaatttattaatacaggatctagcaaaggaaattgtgccattaaggcgttgatgcaattgacgactaaggccactactcaaatagcacctaaacaagttgctggtacaggagttcagttttatatgattgttatcggtgttataatattggcagcgttgtttatgtactatgccaagcgtatgttgttcacatccaccaatgataaaatcaaacttattttagccaataaggaaaacgtccattggactacttacatggacacattctttagaacttctccgatggttattgctaccacggatatgcaaaactgaaaatatattgataatattttaatagattaacatggaagttatcactgatcgtctagacgatatagtgaaacaaaatatagcggatgaaaaatttgtagattttgttatacacggtctagagcatcaatgtcctgctatacttcgaccattaattaggttgtttattgatatactattatttgttatagtaatttatatttttacggtacgtctagtaagtagaaattatcaaatgttgttggcgttggtggcgctagtcatcacattaactattttttattactttatactataatagtactagactgacttctaacaaacatctcacctgccataaataaatgcttgatattaaagtcttctatttctaacactattccatctgtggaaaataatactctgacattatcgctaattgacacatcggtgagtgatatgcctataaagtaataatcttctttgggcacatataccagtgtaccaggttctaacaacctatttactggtgctcctatagcatactttttctttaccttgagaatatccatcgtttgcttggtcaatagcgatatgtgattttttatcaaccactcgaaaaagtaattggagtgttcatatcctctacgggctattgtctcatggccgtgtatgaaatttaagtaacacgactgtggtagatttgttctatagagccggttgccgcaaatagatagaactaccaatatgtctgtacaaatgttaaacattaattgattaacagaaaaaacaatgttcgttctgggaatagaaaccagatcaaaacaaaattcgttagaatatatgccacgtttatacattgaatataaaataactacagtttgaaaaataacagtatcatttaaacatttaacttgcggggttaatctcacaactttactgtttttgaactgttcaaaatatagcatagatccgtgagaaatacgtttagccgcctttaatagaggaaatcccaccgcctttctggatctcaccaacgacgatagttctgaccagcaactcatttcttcatcatccacctgttttaacatataataggcaggagatagatatccgtcattgcaatattccttctcgtaggcacacaatctaatattgataaaatctccattctcttctctgcatttattatcttgtttcggtggctgattaggctgtagtcttggtttaggctttggtatatcgttgttgaatctattttggtcattaaatctttcatttcttcctggtatatttttatcacctcgtttggttggatttttgtctatattatcgtttgtaacatcggtacgggtattcatttatcacaaaaaaaacttctctaaatgagtctactgctagaaaacctcatcgaagaagataccatattttttgcaggaagtatatctgagtatgatgatttacaaatggttattgccggcgcaaaatccaaatttccaagatctatgctttctatttttaatatagtacctagaacgatgtcaaaatatgagttggagttgattcataacgaaaatatcacaggagcaatgtttaccacaatgtataatataagaaacaatttgggtctaggagatgataaactaactattgaagccattgaaaactatttcttggatcctaacaatgaagttatgcctcttattattaataatacggatatgactgccgtcattcctaaaaaaagtggtaggagaaagaataagaacatggttatcttccgtcaaggatcatcacctatcttgtgtattttcgaaactcgtaaaaagattaatatttataaagaaaatatggaatccgcgtcgactgagtatacacctatcggagacaacaaggctttgatatctaaatatgcgggaattaatatcctaaatgtgtattctccttccacatccataagattgaatgccatttacggattcaccaataaaaataaactagagaaacttagtactaataaggaactagaatcgtatagttctagccctcttcaagaacccattaggttaaatgattttctgggactattggaatgtgttaaaaagaatattcctctaacagatattccgacaaaggattgattactataaatggagaatgttcctaatgtatactttaatcctgtgtttatagagcccacgtttaaacattctttattaagtgtttataaacacagattaatagttttatttgaagtattcgttgtattcattctaatatatgtattttttagatctgaattaaatatgttcttcatgcctaaacgaaaaatacccgatcctattgatagattacgacgtgctaatctagcgtgtgaagacgataaattaatgatctatggattaccatggatgacaactcaaacatctgcgttatcaataaatagtaaaccgatagtgtataaagattgtgcaaagcttttgcgatcaataaatggatcacaaccagtatctcttaacgatgttcttcgcagatgatgattcattttttaagtatttggctagtcaagatgatgaatcttcattatctgatatattgcaaatcactcaatatctagactttctgttattattattgatccaatcaaaaaataaattagaagccgtgggtcattgttatgaatctctttcagaggaatacagacaattgacaaaattcacagactttcaagattttaaaaaactgtttaacaaggtccctattgttacagatggaagggtcaaacttaataaaggatatttgttcgactttgtgattagtttgatgcgattcaaaaaagaatcctctctagctaccaccgcaatagatcctgttagatacatagatcctcgtcgcaatatcgcattttctaacgtgatggatatattaaagtcgaataaagtgaacaataattaattctttattgtcatcatgaacggcggacatattcagttgataatcggccccatgttttcaggtaaaagtacagaattaattagacgagttagacgttatcaaatagctcaatataaatgcgtgactataaaatattctaacgataatagatacggaacgggactatggacgcatgataagaataattttgaagcattggaagcaactaaactatgtgatgtcttggaatcaattacagatttctccgtgataggtatcgatgaaggacagttctttccagacattgttgaattctgtgagcgtatggcaaacgaaggaaaaatagttatagtagccgcactcgatgggacatttcaacgtaaaccgtttaataatattttgaatcttattccattatctgaaatggtggtaaaactaactgctgtgtgtatgaaatgctttaaggaggcttccttttctaaacgattgggtgaggaaaccgagatagaaataataggaggtaatgatatgtatcaatcggtgtgtagaaagtgttacatcgactcataatattatattttttatctaaaaaactaaaaataaacattgattaaattttaatataatacttaaaaatggatgttgtgtcgttagataaaccgtttatgtattttgaggaaattgataatgagttagattacgaaccagaaagtgcaaatgaggtcgcaaaaaaactgccgtatcaaggacagttaaaactattactaggagaattattttttcttagtaagttacagcgacacggtatattagatggtgccaccgtagtgtatataggatctgctcccggtacacatatacgttatttgagagatcatttctataatttaggagtgatcatcaaatggatgctaattgacggccgccatcatgatcctattttaaatggattgcgtgatgtgactctagtgactcggttcgttgatgaggaatatctacgatccatcaaaaaacaactgcatccttctaagattattttaatttctgatgtgagatccaaacgaggaggaaatgaacctagtacggcggatttactaagtaattacgctctacaaaatgtcatgattagtattttaaaccccgtggcgtctagtcttaaatggagatgcccgtttccagatcaatggatcaaggacttttatatcccacacggtaataaaatgttacaaccttttgctccttcatattcagctgaaatgagattattaagtatttataccggtgagaacatgagactgactcgagttaccaaatcagacgctgtaaattatgaaaaaaagatgtactaccttaataagatcgtccgtaacaaagtagttgttaactttgattatcctaatcaggaatatgactattttcacatgtactttatgctgaggaccgtgtactgcaataaaacatttcctactactaaagcaaaggtactatttctacaacaatctatatttcgtttcttaaatattccaacaacatcaactgaaaaagttagtcatgaaccaatacaacgtaaaatatctagcaaaaattctatgtctaaaaacagaaatagcaagagatccgtacgcagtaataaatagaaacgtactactgagatatactaccgatatagagtataatgatttagttactttaataaccgttagacataaaattgattctatgaaaactgtgtttcaggtatttaacgaatcatccataaattatactccggttgatgatgattatggagaaccaatcattataacatcgtatcttcaaaaaggtcataacaagtttcctgtaaattttctatacatagatgtggtaatatctgacttatttcctagctttgttagactagatactacagaaactaatatagttaatagtgtactacaaacaggcgatggtaaaaagactcttcgtcttcccaaaatgttagagacggaaatagttgtcaagattctctatcgccctaatataccattaaaaattgttagatttttccgcaataacatggtaactggagtagagatagccgatagatctgttatttcagtcgctgattaatcaattagtagagatgagataagaacattataataatcaataatatatcttatatctcgtttagaaaaatgctaatattaaaatagctaacgctagtaatccaatcggaagccatttgatatctataatagggtatctaatttcctgattcagatagcggacagctatattctcggtagctactcgtttggaatcacaaacattatttacatctaatttactatctgtaatggaaacgtttcccaatgaaatggtacaatccgatacattgcattttgttatatttttttttaaagaggctggtaacaacgcatcgcttcgtttacatggctcgtaccaacaataatagggtaatcttgtatctattcctatccgtactatgcttttatcaggataaatacatttacatcgtatatcgtctttgttagcatcacagaatgcataaatttgttcgtccgtcatgataaaaatttaaagtgtaaatataactattatttttatagttgtaataaaaagggaaatttgattgtataccttcggttctttaaaagaaactgacttgataaaaatggctgtaatctctaaggttacgtatagtctatatgatcaaaaagagattaatgctacagatattatcattagtcatgttaaaaatgacgacgatatcggtaccgttaaagatggtagactaggtgctatggatggggcattatgtaagacttgtgggaaaacggaattggaatgtttcggtcactggggtaaagtaagtatttataaaactcatatagttaagcctgaatttatttcagaaattattcgtttactgaatcatatatgtattcactgcggattattgcgttcacgagaaccgtattccgacgatattaacctaaaagagttatcgggacacgctcttaggagattaaaggataaaatattatccaagaaaaagtcatgttggaacagtgaatgtatgcaaccgtatcaaaaaattactttttcaaagaaaaaggtttgtttcgtcaacaagttggatgatattaacgttcctaattctctcatctatcaaaagttaatttctattcatgaaaagttttggccattattagaaattcatcaatatccagctaacttattttatacagactactttcccatccctccgttgattattagaccggctattagtttttggatagatagtatacccaaagaaaccaatgaattaacttacttattaggtatgatcgttaagaattgtaacttgaatgctgatgaacaggttatccagaaggcggtaatagaatacgatgatattaaaattatttctaataacacttccagtatcaatttatcatatattacatccggcaaaaataatatgattagaagttatatcgtcgcccgacgaaaagatcagacggctagatctgtaattggtcccagtacatctatcaccgttaatgaggtaggaatgcccgcatatattagaaatacacttacagaaaagatatttgttaatgcctttacagtggataaagttaaacaactattagcatcaaaccaagttaaattttactttaataaacgattaaaccaattaacaagaatacgccaaggaaagtttatcaaaaataaaatacatttattgcctggtgattgggtagaagtagctgttcaagaatatacaagtattatttttggaagacagccgtctctacatagatacaacgtcatcgcttcatctatcagagctaccgaaggagatactatcaaaatatctcccggaattgccaactctcaaaatgctgatttcgacggagatgaagaatggatgatattagaacaaaatcctaaagctgtaattgaacaaagtattcttatgtatccgacgacgttactcaaacacgatattcatggagcccccgtttatggatctattcaagatgaaatcgtagcagcgtattcattgtttaggatacaagatctttgtttagatgaagtattgaacatcttggggaaatatggaagagagttcgatcctaaaggtaaatgtaaattcagcggtaaagatatctatacttacttgataggtgaaaagattaattatccgggtctcttaaaggatggtgaaattattgcaaacgacgtagatagtaattttgttgtggctatgaggcatctgtcattggctggactcttatccgatcataagtcgaacgtggaaggtatcaactttattatcaagtcatcttatgtttttaagagatatctatctatttacggttttggggtgacattcaaagatctgagaccaaattcgacgttcactaataaattggaggccatcaacgtagaaaaaatagaacttatcaaagaagcatacgccaaatatctcaacgatgtaagagacgggaaaatagttccattatctaaagctttagaggcggactatgtggaatccatgttatccaacttgacaaatcttaatatccgagagatagaagaacatatgagacaaacgctgatagatgatccagataataacctcctgaaaatggccaaagcgggttataaagtaaatcctacagaactaatgtatattctaggtacgtatggacaacaaaggattgatggtgaaccagcagagactcgagtattgggtagagtcttaccttactatcttccagactctaaggatccagaaggaagaggttacattcttaattctttaacaaaaggattaacaggttctcaatattacttttcgatgctggttgcaagatctcaatctactgatatcgtctgtgaaacatcacgtaccggaacactggctagaaaaatcattaaaaagatggaggatatggtggtcgacggatacggacaagtagttataggtaatacgctcatcaagtacgccgccaattataccaaaattctaggctcagtatgtaaacctgtagatcttatctatccagatgagtccatgacttggtatttggaaattagtgctctgtggaataaaataaaacagggattcgtttactctcagaaacagaaacttgcaaagaagacattggcgccgtttaatttcctagtattcgtcaaacccaccactgaggataatgctattaaggttaaggatctgtacgatatgattcataacgtcattgatgatgtgagagagaaatacttctttacggtatctaatatagattttatggagtatatattcttgacgcatcttaatccttctagaattagaattacaaaagaaacggctatcactatctttgaaaagttctatgaaaaactcaattatactctaggtggtggaactcctattggaattatttctgcacaggtattgtctgagaagtttacacaacaagccctgtccagttttcacactactgaaaaaagtggtgccgtcaaacaaaaacttggtttcaacgagtttaataacttgactaatttgagtaagaataagaccgaaattatcactctggtatccgatgatatctctaaacttcaatctgttaagattaatttcgaatttgtatgtttgggagaattaaatccagacatcactcttcgaaaagaaacagataggtatgtagtagatataatagtcaatagattatacatcaagagagcagaaattaccgaattagtcgtcgaatatatgattgaacgattcatctcctttagcgtcattgtaaaggaatggggtatggaaacattcattgaggacgaggataatattagatttactgtctatctaaatttcgttgaaccagaggaattgaatcttagtaagtttatgatggttcttccgggggcagccaacaagggaaagattagtaaattcaagattcctatctctgattatacgggttatgacgacttcaatcaaacaaaaaagctcaataagatgactgtagaactcatgaatctaaaagaattaggttctttcgatttggaaaacgtcaacgtgtatcctggagtatggaatacatacgatatcttcggtatcgaggccgctcgtgaatacttgtgcgaagccatgttaaacacctatggagaagggttcgattatctgtatcagccttgtgatcttctcgctagtttactatgtgctagttacgaaccagaatcagtgaataaattcaagttcggcgcagctagtactcttaagagagctacgttcggagacaataaagcattgttaaacgcggctcttcataaaaagtcagaacctattaacgataatagtagctgccacttttttagcaaggtccctaatataggaactggatattacaaatactttatcgacttgggtcttctcatgagaatggaaaggaaactatctgataagatatcttctcaaaagatcaaggaaatggaagaaacagaagacttttaattcttatcaataacatatttttctatgatctgtcttttaaacgatggattttccacaaatgcgcctctcaagtccctcatagaatgatacacgtataaaaaatatagcataggcaatgactccttatttttagacattagatatgccaaaatcatagccccgcttctatttactcccgcagcacaatgaaccaacacgggctcgtttcgttgatcacatttagataaaaaggcggttacgtcgtcaaaatatttactaatatcggtagttgtatcatctaccaacggtatatgaataatattaatattagagttaggtaatgtatatttatccatcgtcaaatttaaaacatatttgaacttaacttcagatgatggtgcatccatagcatttttataatttcccaaatacacattattggttacccttgtcattatagtgggagatttggctctgtgcatatctccagttgaacgtagtagtaagtatttatacaaacttttcttatccatttataacgtacaaatggataaaactactttatcggtaaacgcgtgtaatttagaatacgttagagaaaaggctatagtaggcgtacaagcagccaaaacatcaacacttatattctttgttattatattggcaattagtgcgctattactctggtttcagacgtctgataatccagtctttaatgaattaacgagatatatgcgaattaaaaatacggttaacgattggaaatcattaacggatagcaaaacaaaattagaaagtgatagaggtagacttctagccgctggtaaggatgatatattcgaattcaaatgtgtggatttcggcgcctattttatagctatgcgattggataagaaaacatatctgccgcaagctattaggcgaggtactggagacgcgtggatggttaaaaaggcggcaaaggtcgatccatctgctcaacaattttgtcagtatttgataaaacacaagtctaataatgttattacttgtggtaatgagatgttaaatgaattaggttatagcggttattttatgtcaccgcattggtgttccgattttagtaatatggaatagtgttagataaatgcggtaacgaatgttcctgtaaggaaccataacagtttagatttaacgttaaagatgagcataaacataataaacaaaattacaatcaaacctataacattaatatcaaacaatccaaaaaatgaaatcagtggagtagtaaacgcgtacataactcctggataacgtttagtagctgccgttcctattctagaccaaaaattcggtttcatgttttcgaaacggtgttctgcaacaagtcggggatcgtgttctacatatttggcggcattatccagtatctgcctattgatcttcatttcgttttcaattctggctatttcaaaataaaatcccgatgatagacctccagactttataatttcatctacgatgttcagcgccgtagtaactctaataatataggctgataagctaacatcataccctcctgtatatgtgaatatggcatgatttttgtccattacaagctcggttttaactttattgcctgtaataatttctctcatctgtaggatatctatttttttgtcatgcattgccttcaagacgggacgaagaaacgtaatatcctcaataacgttatcgttttctacaataactacatattctacctttttattttctaactcggtaaaaaaattagaatcccatagggctaaatgtctagcgatatttcttttcgtttcctctgtacacatagtgttacaaaaccctgaaaagaagtgagtatacttgtcatcatttctaatgtttcctccagtccactgtataaacgcataatccttgtaatgatctggatcatccttgactaccacaacatttcttttttctggcataacttcgttgtcctttacatcatcgaacttctgatcattaatatgctcatgaacattaggaaatgtttctgatggaagtctatcaataactggcacaacaataacaggagttttcgccgccgccatttagttattgaaattaatcatatacaactctttaatacgagttatattttcgtctatccattgtttcacatttacatatttcgacaaaaagatataaaatgcgtattccaatgcttctctgtttaatgaattactaaaatatacaaacacgtcactgtctggcaataaatgatatcttagaatattgtaacaatttattttgtattgcacatgttcgtgatctatgagttcttcttcgaatggcataggatctccgaatctgaaaacgtataaataggagttagaataataatatttgagagtattggtaatatataaactctttagcggtataattagtttttttctctcaatttctatttttagatgtgatggaaaaatgactaattttgtagcattagtatcatgaactctaatcaaaatcttaatatcttcgtcacacgttagctctttgaagtttttaagagatgcatcagttggttcgaccgatggagtaggtgcaacaattttttgttcgatgtatgtatgtactggagccattgttttaactataatggtgcttgtatcgaaaaactttaatgcagatagcggaagctcttcgccgcgactttctacatcgtaattgggttctaacgccgatctctgaatggatactagttttctaagttctaatgtgattctctgaaaatgtaaatccaattcctccggcattatagatgtgtatacatcggtaaataaaactatagtatccaacgatcccttctcgcaaattctagtcttaaccaaaaaatcgtatataaccacggagatggcgtatttaagagtggattcttctaccgttttgttcttggatgtcatataggaaactataaagtccgcactactgttaagaatgattactaacgcaactatatagttcaaattaagcattttggaaacataaaataactctgtagacgatacttgactttcgaataagtttgcagacaaacgaagaaagaacagacctctcttaatttcagaagaaaactttttttcgtattcctgacgtctagagtttatatcaataagaaagttaagaattagtcggttaatgttgtatttcattacccaagtttgagatttcataatattatcaaaagacatgataatattaaagataaagcgctgactatgaacgaaatagctatatggttcgctcaaaaatatagtcttgttaaacgtggaaacgataactgtatttttaatcacgtcagcggcatctaaattaaatataggtatatttattccacacactctacaatatgccacaccatcttcataataaataaattcgttagcaaaattattaattttagtgaaatagttagcgtcaactttcatagcttccttcaatctaatttgatgctcacacggtgcgaattccactctaacatcccttttccatgcctcaggttcatcgatctctataatatctagttttttgcgtttcacaaacacaggctcgtctctcgcgatgagatctgtatagtaactatgtaaatgataactagatagaaagatgtagctatatagatgacgatcctttaagagaggtataataactttaccccaatcagatagactgttgttatggtcttcggaaaaagaatttttataaatttttccagtattttccaaatatacgtacttaacatctaaaaaatccttaatgataataggaatggataatccgtctattttataaagaaatacatatcgcacattatacttttttttggaaatgggaataccgatgtgtctacataaatatgcaaagtctaaatattttttagagaatcttaattggtccaaattcttttccaagtacggtaatagatttttcatattgaacggtatcttcttaatctctggttctagttccgcattaaatgatgaaactaagtcactatttttataactaacgattacatcacctctaacatcatcatttaccagaatactgatcttcttttgtcgtaaatacatgtctaatgtgttaaaaaaaagatcatacaagttatacgtcatttcatctgtggtattcttgtcattgaaggataaactcgtactaatctcttctttaacagcctgttcaaatttatatcctatatacgaaaaaatagcaaccagtgtttgatcatccgcgtcaatattctgttctatcgtagtgtataacaatcgtatatcttcttctgtgatagtcgatacgttataaaggttgataacgaaaatatttttatttcgtgaaataaagtcatcgtaggattttggacttatattcgcgtctagtagatatgcttttatttttggaatgatctcaattagaatagtctctttagagtccatttaaagttacaaacaactaggaaattggtttatgatgtataatttttttagtttttatagattctttattctatacttaaaaaatgaaaataaatacaaaggttcttgagggttgtgttaaattgaaagcgagaaataatcataaattatttcattatcgcgatatccgttaagtttgtatcgtaatggcgtggtcaattacaaataaagcggatactagtagcttcacaaagatggctgaaatcagagctcatctaaaaaatagcgctgaaaataaagataaaaacgaggatattttcccggaagatgtaataattccatctactaagcccaaaaccaaacgagccactactcctcgtaaaccagcggctactaaaagatcaaccaaaaaggaggaagtggaagaagaagtagttatagaggaatatcatcaaacaactgaaaaaaattctccatctcctggagtcagcgacattgtagaaagcgtggccgctgtagagctcgatgatagcgacggggatgatgaacctatggtacaagttgaagctggtaaagtaaatcatagtgctagaagcgatctctctgacctaaaggtggctaccgacaatatcgttaaagatcttaagaaaattattactagaatctctgcagtatcgacggttctagaggatgttcaagcagctggtatctctagacaatttacttctatgactaaagctattacaacactatctgatctagtcaccgagggaaaatctaaagttgttcgtaaaaaagttaaaacttgtaagaagtaaatgcgtgcacttttttataaagatggtaaactctttaccgataataattttttaaatcctgtatcagacgataatccagcgtatgaggttttgcaacatgttaaaattcctactcatttaacagatgtagtagtatatgaacaaacgtgggaggaggcgttaactagattaatttttgtgggaagtgattcaaaaggacgtagacaatacttttacggaaaaatgcatgtacagaatcgcaacgctaaaagagatcgtatttttgttagagtatataacgttatgaaacgaattaattgttttataaacaaaaatataaagaaatcgtccacagattccaattatcagttggcggtttttatgttaatggaaactatgttttttattagatttggtaaaatgaaatatcttaaggagaatgaaacagtagggttattaacactaaaaaataaacacatagaaataagtcccgatgaaatagttatcaagtttgtaggaaaggacaaagtttcacatgaatttgttgttcataagtctaatagactatataagccgctattgaaactgacggatgattctagtcccgaagaatttctgttcaacaaactaagtgaacgaaaggtatatgaatgtatcaaacagtttggtattagaatcaaggatctccgaacgtatggagtcaattatacgtttttatataatttttggacaaatgtaaagtccatatctcctcttccatcaccaaaaaagttaatagcgttaactatcaaacaaactgctgaagtggtaggtcatactccatcaatttcaaaaagagcttatatggcaacgactattttagaaatggtaaaggataaaaattttttagatgtagtatctaaaactacgttcgatgaattcctatctatagtcgtagatcacgttaaatcatctacggatggatgatatagatctttacacaaataattacaaaaccgataaatggaaatggataagcgtatgaaatctctcgcaatgaccgctttctttggggagctaagcacattagatattatggcattgataatgtctatatttaaacgccatccaaacaataccattttttcagtggataaggatggtcagtttatgattgatttcgaatacgataattataaggcttctcaatatttggatctgaccctcactccgatatctggagatgaatgcaagactcacgcatcgagtatagccgaacaattggcgtgtgtggatattattaaagaggatattagcgaatatatcaaaactactccccgtcttaaacgatttataaaaaaataccgcaatagatcagatactcgcatcagtcgagatacagaaaagcttaaaatagctctagctaaaggcatagattacgaatatataaaagacgcttgttaataagtaaatgaaaaaaaactagtcgtttataataaaacacgatatggatgccaacgtagtatcatcttctactattgcgacgtatatagacgctttagcgaagaatgcttcggaattagaacagaggtctaccgcatacgaaataaataatgaattggaactagtatttattaagccgccattgattactttgacaaatgtagtgaatatctctacgattcaggaatcgtttattcgatttaccgttactaataaggaaggtgttaaaattagaactaagattccattatctaaggtacatggtctagatgtaaaaaatgtacagttagtagatgctatagataacatagtttgggaaaagaaatcattagtgacggaaaatcgtcttcacaaagaatgcttgttgagactatcgacagaggaacgtcatatatttttggattacaagaaatatggatcctctatccgactagaattagtcaatcttattcaagcaaaaacaaaaaactttacgatagactttaagctaaaatattttctaggatccggtgcccagtctaaaagttctttattacacgctattaatcatccaaagtcaaggcctaatacatctctggaaatagaatttacacctagagacaatgaaacagttccatatgatgaactaataaaggaattgacgactctctcgcgtcatatatttatggcttctccagagaatgtaattctttctccgcctattaacgcgcctataaaaacctttatgttgcctaaacaagatatagtaggtttggatctggaaaatctatatgccgtaactaagactgacggcattcctataactatcagagttacatcaaacgggttgtattgttattttacacatcttggttatattattagatatcctgttaagagaataatagattccgaagtagtagtctttggtgaggcagttaaggataagaactggaccgtatatctcattaagctaatagagcctgtgaatgcaatcaatgatagactagaagaaagtaagtatgttgaatctaaactagtggatatttgtgatcggatagtattcaagtcaaagaaatacgaaggtccgtttactacaactagtgaagtcgtcgatatgttatctacatatttaccaaagcaaccagaaggtgttattctgttctattcaaagggacctaaatctaacattgattttaaaattaaaaaggaaaatactatagaccaaactgcaaatgtagtatttaggtacatgtccagtgaaccaattatctttggagagtcgtctatctttgtagagtataagaaatttagcaacgataaaggctttcctaaagaatatggttctggtaagattgtgttatataacggcgttaattatctaaataatatctattgtttggaatatattaatacacataatgaagtgggtattaagtccgtggttgtacctattaagtttatagcagaattcttagttaatggagaaatacttaaacctagaattgataaaaccatgaaatatattaactcagaagattattatggaaatcaacataatatcatagtcgaacatttaagagatcaaagcatcaaaataggagatatctttaacgaggataaactatcggatgtgggacatcaatacgccaataatgataaatttagattaaatccagaagttagttattttacgaataaacgaactagaggaccgttgggaattttatcaaactacgtcaagactcttcttatttctatgtattgttccaaaacatttttagacgattccaacaaacgaaaggtattggcgattgattttggaaacggtgctgacctggaaaaatacttttatggagagattgcgttattggtagcgacggatccggatgctgatgctatagctagaggaaatgaaagatacaacaaattaaactctggaattaaaaccaagtactacaaatttgactacattcaggaaactattcgatccgatacatttgtctctagtgtcagagaagtattctattttggaaagtttaatatcatcgactggcagtttgctatccattattcttttcatccgagacattatgctaccgtcatgaataacttatccgaactaactgcttctggaggcaaggtattaatcactaccatggacggagacaaattatcaaaattaacagataaaaagacttttataattcataagaatttacctagtagcgaaaactatatgtctgtagaaaaaatagctgatgatagaatagtggtatataatccatcaacaatgtctactccaatgactgaatacattatcaaaaagaacgatatagtcagagtgtttaacgaatacggatttgttcttgtagataacgttgatttcgctacaattatagaacgaagtaaaaagtttattaatggcgcatctacaatggaagatagaccatctacaagaaactttttcgaactaaatagaggagccattaaatgtgaaggtttagatgtcgaagacttacttagttactatgttgtttatgtcttttctaagcggtaaataataatatggtatgggttctgatctcccagttctaaatgcattaaataattccaatagagcgatttttgttcctataggaccttccaactgtggatactctgtattgttaatagatatattaatacttttgtcgggtaacagaggttctacgtcttttaaaaataaaagtttgataacatctggcctgttcataaataaaaacttggcgattctatatatactcttattatcaaatctagccattgtcttatagatgtgagctactgtaggtgtaccatttgattttctttctaatactatatatttctctcgaagaagttcttgcacatcatctgggaataaaatactactgttgagtaaatcagttattttttttatatcgatattgatggacatttttatagttaaggataataagtatcccaaagtagataacgacgataacgaagtatttatacttttaggaaatcacaatgactttatcagattaaaattaacaaaattaaaggagcatgtatttttttctgaatatattgtgactccagatacatatggatctttatgcgtcgaattaaatgggtctagttttcagcacggcggtagatatatagaggtggaggaatttatagatgctggaagacaagttagatggtgttctacatccaatcatatatctaaagatatacccgaagatatgcacactgataaatttgtcatttatgatatatacacttttgacgctttcaagaataaacgattggtattcgtacaggtacctccgtcgttaggagatgatagtcatttgactaatccgttattgtctccgtattatcgtaattcagtagccagacaaatggtcaatgatatgatttttaatcaagattcatttttaaaatatttattagaacatctgattagaagccactatagagtttctaaacatataacaatagttagatacaaggataccgaagaattaaatctaacgagaatatgttataatagagataagtttaaggcgtttgtattcgcttggtttaacggcgtttcggaaaatgaaaaggtactagatacgtataaaaaggtatctaatttgatataatgaattcagtgactgtatcacacgcgccatatactattacttatcacgatgattgggaaccagtaatgagtcaattggtagagttttataacgaagtagccagttggctgctacgagacgagacgtcgcctattcctgataagttctttatacagttgaaacaaccgcttagaaataaacgagtatgtgtgtgcggtatagatccgtatccgaaagatggaactggtgtaccgttcgaatcaccaaattttacaaaaaaatcaattaaggagatagcttcatctatatctagattaaccggagtaattgattataaaggttataaccttaatataatagacggggttataccctggaattattacttaagttgtaaattaggagaaacaaaaagtcacgcgatctactgggataagatttccaagttactgctgcagcatataactaaacacgttagtgttctttattgtttgggtaaaacagatttctcgaatatacgggccaagttagaatccccggtaactaccatagtcggatatcatccagcggctagagaccgccaattcgagaaagatagatcatttgaaattatcaacgttttactggaattagacaacaaggcacctataaattgggctcaagggtttatttattaatgctttagtgaaattttaacttgtgttctaaatggatgcggctattagaggtaatgatgttatctttgttcttaagactataggtgtcccgtcagcgtgcagacaaaatgaagatccaagatttgtagaagcatttaaatgcgacgagttagaaagatatattgagaataatccagaatgtacactattcgaaagtcttagggatgaggaagcatactctatagtcagaattttcatggatgtagatttagacgcgtgtctagacgaaatagattatttaacggctattcaagattttattatcgaggtgtcaaactgtgtagctagattcgcgtttacagaatgcggcgccattcatgaaaatgtaataaaatccatgagatctaatttttcattgactaagtctacaaatagagataaaacaagttttcatattatctttttagacacgtataccactatggatacattgatagctatgaaacgaacactattagaattaagtagatcatctgaaaatccactaacaagatcgatagacactgccgtatataggagaaaaacaactcttcgggttgtaggtactaggaaaaatccaaattgcgacactattcatgtaatgcaaccaccgcatgataatatagaagattacctattcacttacgtggatatgaacaacaatagttattacttttctctacaacaacgattggaggatttagttcctgataagttatgggaaccagggtttatttcattcgaagacgctataaaaagagtttcaaaaatattcattaattctataataaactttaatgatctcgatgaaaataattttacaacggtaccactggtcatagattacgtaacaccttgtgcattatgtaaaaaacgatcgcataaacatccgcatcaactatcgttggaaaatggtgctattagaatttacaaaactggtaatccacatagttgtaaagttaaaattgttccgttggatggtaataaactgtttaatattgcacaaagaattttagacactaactctgttttattaaccgaacgaggagaccatatagtttggattaataattcatggaaatttaacagcgaagaacccttgataacaaaactaattttgtcaataagacatcaactacctaaggaatattcaagcgaattactctgtccaagaaaacgaaagactgtagaagctaacatacgagacatgttagtagattcagtagagaccgatacctatccggataaacttccgtttaaaaatggtgtattggacctggtagacggaatgttttactctggagatgatgctaaaaaatatacgtgtactgtatcaaccggatttaaatttgacgatacaaagttcgtcgaagacagtccagaaatggaagagttaatgaatatcattaacgatatccaaccattaacggatgaaaataagaaaaatagagagctatatgaaaaaacattatctagttgtttatgcggtgctaccaaaggatgtttaacattcttttttggagaaactgcaactggaaagtcgacaaccaaacgtttgttaaagtctgctatcggtgacctgtttgttgagacgggtcaaacaattttaacagatgtattggataaaggacctaatccatttatcgctaacatgcatttgaaaagatctgtattctgtagcgaactacctgattttgcctgtagtggatcaaagaaaattagatctgacaatattaaaaagttgacagaaccttgtgtcattggaagaccgtgtttctccaataaaattaataatagaaaccatgcgacaatcattatcgatactaattacaaacctgtttttgataggatagataacgcattaatgagaagaattgccgtcgtgcgattcagaacacacttttctcaaccttctggtagagaggctgctgaaaataatgacgcgtacgataaagtcaaactattagacgaggggttagatggtaaaatacaaaataatagatatagattcgcatttctatacttgttggtgaaatggtacagaaaatatcatgttcctattatgaaactatatcctacacccgaagagattcctgactttgcattctatctcaaaataggtactctgttagtatctagctctgtaaagcatattccattaatgacggacctctccaaaaagggatatatattgtacgataatgtggtcactcttccgttgactactttccaacagaaaatatccaagtattttaattctagactatttggacacgatatagagagcttcatcaatagacataagaaatttgccaatgttagtgatgaatatctgcaatatatattcatagaggatatttcatctccgtaaatatatgctcatatatttatagaagatatcacatatctaaatgaataccggaatcatagatttatttgataatcatgttgatagtataccaactatattacctcatcagttagctactctagattatctagttagaactatcatagatgagaacagaagcgtgttattgttccatattatgggatcaggtaaaacaataatcgctttgttgttcgccttggtagcttccagatttaaaaaggtttacattctagtgcctaatatcaacattttgaaaatttttaattataatatgggtgtagctatgaacttgtttaatgacgaattcatagctgagaatatctttattcattccacaacaagtttttattctcttaattataacgataacgtcattaattataacggattatctcgctacaataactctatttttatcgttgatgaggcacataatatctttgggaataatactggagaacttatgaccgtgataaaaaataaaaacaagattccttttctactattgtctggatctcccattactaacacacctaatactctgggtcatattatagatttaatgtccgaagagacgatagattttggtgagattattagtcgtggtaagaaagtaattcagacacttcttaacgaacgcggtgtgaatgtacttaaggatttgcttaaaggaagaatatcatattacgaaatgcctgataaagatctaccaacgataagatatcacggacgtaagtttctagatactagagtagtatattgtcacatgtctaaacttcaagagagagattatatgattactagacgacagctatgttatcatgaaatgtttgataaaaatatgtataacgtgtcaatggcagtattgggacaacttaatctgatgaataatttagatactttatttcaggaacaggataaggaattgtacccaaatctgaaaataaataatggcgtgttatacggagaagaattggtaacgttaaacattagttccaaatttaaatactttattaatcggatacagacactcaacggaaaacattttatatacttttctaattctacatatggcggattggtaattaaatatatcatgctcagtaatggatattctgaatataatggttctcagggaactaatccacatatgataaacggcaaaccaaaaacatttgctatcgttactagtaaaatgaaatcgtctttagaggatctattagatgtgtataattctcctgaaaacgatgatggtagtcaattgatgtttttgttttcgtcaaacattatgtccgaatcctatactctgaaagaggtaaggcatatttggtttatgactatcccagatactttttctcaatacaaccaaattcttggacgatctattagaaaattctcttacgccgatatttctgaaccagttaatgtatatcttttagccgccgtatattccgatttcaatgacgaagtaacgtcattaaacgattacacacaggatgaattgattaatgttttaccatttgacatcaaaaagctgttatatctaaaatttaagactaaagaaacgaatagaatatactctattcttcaagagatgtctgaaacgtattctcttccaccacatccatcaattgtaaaagttttattgggagaattggtcagacaatttttttataataattctcgtattaagtataacgactccaagttacttaaaatggttacatcagttataaaaaataaagaagacgctaggaattacatagatgatattgtaaacggtcacttctttgtatcgaataaagtatttgataaatctcttttatacaaatacgaaaacgatattattacagtaccgtttagactttcctacgaaccatttgtttggggagttaactttcgtaaagaatataacgtggtatcttctccataaaactgatgaaatatataaagaaataaatgtcgagctttgttaccaatggataccttccagttacattggaaccacacgagctgacgttagacataaaaactaatattaggaatgccgtatataagacgtatctccatagagaaattagtggtaaaatggccaagaaaatagaaattcgtgaagacgtggaattacctctcggcgaaatagttaataattctgtagttataaacgttccgtgtgtaataacctacgcgtattatcacgttggggatatagtcagaggaacattaaacatcgaagatgaatcaaatgtaactattcaatgtggagatttaatctgtaaactaagtagagattcgggtactgtatcatttagcgattcaaagtactgcttttttcgaaatggtaatgcgtatgacaatggcagcgaagtcactgccgttctaatggaggctcaacaaggtatcgaatctagttttgtttttctcgcgaatatcgtcgactcataaaaaagagaatagcggtaagtataaacacgaatactatggcaataattgcgaatgttttattctcttcgatatatttttgataatatgaaaaacatgtctctctcaaatcggacaaccatctcataaaatagttctcgcgcgctggagaggtagttgctgctcgtataatctccccagaataatatacttgcgtgtcgtcgttcaatttatacggatttctatagttctctgttatataatgcggttttccatcatgattagacgacgacaatagtgttctgaatttagatagttgatcagaatgaatgtttattggcgttggaaaaattatccatacagcgtctgcagagtggttgatagttgttcctagatatgtaaaataatccaacttactaggcagcaaattgtctagataaaatactgaatcaaacggtgcagacgtattggcggatctaatggaatccaattgattaactatcttttgaaaatatacatttttatgatccaatacttgtaagaatatagaaataatgataagtccatcatcgtgtttttttgcctcttcataagaactatattttttcttattccaatgaacaagattaatctctccagagtatttgtacacatctatcaagtgattggatccataatcgtcttcctttccccaatatatatgtagtgatgataacacatattcattggggagaaaccctccacttatatatcctcctttaaaattaatccttactagttttccagtgttctggatagtggttggtttcgactcattataatgtatgtctaacggcttcaatcgcgcgttagaaattgcttttttagtttctatattaataggagatagttgttgcggcatagtaaaaatgaaatgataactgtttaaaaatagctcttagtatgggaattacaatggatgaggaagtgatatttgaaactcctagagaattaatatctattaaacgaataaaagatattccaagatcaaaagacacgcacgtgtttgctgcgtgtataacaagtgacggatatccgttaataggagctagaagaacttcattcgcgttccaggcgatattatctcaacaaaattcagattctatctttagagtatccactaaactattacggtttatgtactacaatgaactaagagaaatctttagacggttgagaaaaggttctatcaacaatatcgatcctcactttgaagagttaatattattgggtggtaaactagataaaaaggaatctattaaagattgtttaagaagagaattaaaagaggaaagtgatgaacgtataacagtaaaagaattcggaaatgtaattctaaaacttacaacgcgcgataaattatttaataaagtatatataggttattgcatggcgtgttttattaatcaatcgttggaggatttatcgcatactagtatttacaatgtagaaattagaaagattaaatcattaaatgattgtattaacgacgataaatacgaatatctgtcttatatttataatatgctagttaatagtaaatgaacttttacagatctagtataattagtcagattattaagtataatagacgactagctaagtctattatttgcgaggatgactctcaaattattacactcacggcattcgttaaccaatgcctatggtgtcataaacgagtatccgtgtccgctattttattaactactgataacaaaatattagtatgtaacagacgagatagttttctctattctgaaataattagaactagaaacatgtttagaaagaaacgattatttctgaattattccaattatttgaacaaacaggaaagaagtatactatcgtcatttttttctctagatccagctactgctgataatgatagaatagacgctatttatccgggtggcatacccaaaaggggtgagaatgttccagagtgtttatccagggaaattaaagaagaagttaatatagacaattcttttgtattcatagacactcggttttttattcatggcatcatagaagataccattattaataaattttttgaggtaatcttctttgtcggaagaatatctctaacgagtgatcaaatcattgatacatttaaaagtaatcatgaaatcaaggatctaatatttttagatccgaattcaggtaatggactccaatacgaaattgcaaaatatgctctagatactgcaaaactcaaatgttatggccatagaggatgttattacgaatcattaaaaaaattaactgaggatgattgattagaaaatataaattaatttaccatcgtgtatttttataacgggattgtccggcatatcatgtagatagttaccgtctacatcgtatactcgaccatctacgcctttaaatcctctatttattgacattaatctattagaattggaataccaaatattagtaccctcaattagtttattggtaatatttttgttagacgatagatcgatggctcttgaaaccaaggttttccaaccggactcattgtcgatcggtgagaagtctttttcattagcatgaatccattctaatgatgtatgtttaaacactctaaacaattggacaaattcttttgatttgctttgaatgatttcaaataggtcttcgtctacagtaggcataccattagataatctagccattataaagtgcacgtttacatatctacgttctggaggagtaagaacgtgactattgagacgaatggctcttcctactatctgacgaagagacgcctcgttccatgtcatatctaaaatgaagatatcattgattgagaagaagctaataccctcgcctccactagaagagaatacgcatgttttaatgcattctccgttagtgtttgattcttggttaaactcagccaccgccttgattctagtatcttttgttctagatgagaactctatattagagataccaaagactttgaaatatagtaataagatttctattcctgactgattaacaaatggttcaaagactagacatttaccatgggatgctaatattcccaaacatacatctataaatttgacgcttttctcttttaattcagtaaatagagagatatcagccgcactagcatcccctcccaatagttctccccttttaaaggtatctaatgcagatttagaaaattctctatctcttaatgaatttttaaaatcattatatagtgttgctatctcttgcgcgtattcgcccggatcacgattttgtctttcaggaaagctatcgaacgtaaacgtagtagccatacgtctcagaattctaaatgatgatatacctgtttttatttcagcgagtttagccttttgataaatttcttcttgctttttcgacatattaacgtatcgcattaatactgttttcttagcgaatgatgcagacccttctacgtcatcaaaaatagaaaactcgttattaactatgtacgaacataggcctcctagtttggagactaattctttttcatcaactagacgtttattctcaaatagcgattggtgttgtaaggatcctggtcgtagtaagttaaccaacatggtgaattcttgcacactattgacgataggtgtagccgataaacaaatcatcttatggttttttaatgcgatggtcttagataaaaaattatatactgaacgagtaggacggatcttaccatcttctttgattaatgatttagaaatgaagttatgacattcatcaataatgacgcatattctactcttggaattaatagttttgatattagtaaaaaatttatttctaaaattttgatcatcgtaattaataaaaatacaatccttcgttatctctggagcgtatctgagtatagtgttcatccaaggatcttctatcaaagcctttttcaccaataagataatagcccaattcgtataaatatccttaagatgtttgagaatatatacagtagtcattgttttaccgacacccgtttcatggaacaataaaagagaatgcatactgtctaatcctaagaaaactcttgctacaaaatgttgataatccttgaggcgtactacgtccgaccccatcatttcaacaggcatattagtagttctgcgcaatgcataatcgatataggccgcgtgtgatttactcatttatgagtgataagtaataactatgttttaaaaatcacagcagtagtttaactagtcttctctgatgtttgttttcgatactttttgaatcagaagtcatactagaataaagcaacgagtgaacgtaatagagagcttcgtatactctattcgaaaactctaagaacttattaatgaattccgtatccactggattgtttaaaatactaaattgaacactgttcacatccttccaagaagaagacttagtgacggacttaacatgagacataaataaatccaaattttttttacaaacatcactagccaccataatggcgctatcttttaaccagctatcgcttacgcattttagcagtctaacatttttaaagagactacaatatattctcatagtatcgattacacctctaccgaataaagttggaagtttaataatacaatatttttcgtttacaaaatcaaataatggtcgaaacacgtcgaaggttaacatcttataatcgctaatgtatagattgttttcagtgagatgattattagatttaatagcatctcgttcacgtttgaacagtttattgcgtgcgctgaggtcggcaactacggcgtccgctttagtactcctcccataatactttacgctattaatctttaaaatttcatagactttatctagatcgctttctggtaacatgatatcatgtgtaaaaagttttaacatgtcggtcggcattctatttagatcattaactctagaaatctgaagaaagtaattagctccgtattccagactaggtaatgggcttttacctagagacagattaagttctggcaatgtttcataaaatggaagaaggacatgcgttccctcccggatattttttacaatttcatccatttacaactctatagtttgttttcattattattagttattatctcccataatcttggtaatacttaccccttgatcgtaagataccttatacaggtcattacatacaactaccaattgtttttgtacataatagattggatggttgacatccatggtggaataaactactcgaacagatagtttatctttccccctagatacattagccgtaatagttgtcggcctaaagaatatctttggtgtaaagttaaaagttagggttcttgttccattattgctttttgtcagtagttcattataaattctcgagatgggtccgttctctgaatatagaacatcatttccaaatctaacttctagtctagaaataatatcggtcttattcttaaaatctattcccttgatgaagggatcgttaatgaacaaatccttggcctttgattcggctgatctattatctccgttatagacgttacgttgactagtccaaagacttacaggaatagatgtatcgatgatgttgatactatgtgatatgtgagcaaagattgttctcttagtggcatcactatatgttccagtaatggcggaaaactttttagaaatgttatatataaaagaattttttcgtgttccaaacattagcagattagtatgaagataaacactcatattatcaggaacattatcaatttttacatacacatcagcatcttgaatagaaacgataccatcttctggaacctctacgatctcggcagactccggataaccagtcggtggaccatcgctaacaataactagatcatccaacaatctactcacatatgcatctatataatctttttcatcttgtgagtaccctggatacgaaataaatttattatccgtatttccataataaggtttagtataaacagagagcgatgttgccgcatgaacttcagttacagtcgccgttggttggtttatttgacctattactctcctaggtttctctataaatgatggtttaatttgtacattcttaaccatatatccaataaagctcaattcaggaacataaacaaattctttgttgaacgtttcaaagtcgaacgaagagtcacgaataacgatatcggatactggattgaaggttaccgttacggtaatttttgaatcggatagtttaagactgctgaatgtatcttccacatcaaacggagttttaatataaacgtatactgtagatggttctttaatagtgtcattaggagttaggccaatagaaatatcattaagttcactagaatatccagagtgtttcaaagcaattgtattattgatacaattattatataattcttcgccctcaatttcccaaataacaccgttacacgaagagatagatacgtgattaatacatttatatccaacatatggtacgtaaccgaatcttcccatacctttaacttctggaagttccaaactcagaaccaaatgattaagcgcagtaatatactgatccctaatttcgaagctagcgatagcctgattgtctggaccatcgtttgtcataactccggatagagaaatatattgcggcatatataaagttggaatttgactatcgactgcgaagacattagaccgtttaatagagtcatccccaccgatcaaagaattaatgatagtattattcattttctatttaaaatggaaaaagcttacaataaactccgtagagaaatatctataatttgtgagttttccttaaagtaacagcttccgtaaacgccgtctttatctcttagtaagtttattgtatttataaccttttccttatcttcatagaatactaaaggcaacaaagaaatttttggttcttctctaagagctacgtgagacttaaccatagacgccaacgaatccctacatattttagaacagaaatacccaacttcaccacccttgaatgtctcaatactaataggtttaaaaaccaaatcttgattacaaaaccaacacttatcaattacactatttgtcttaatagacacatctgccatagatttataatactttggtagtatacaagcgagtgcttcttctttagcgggcttaaagactgctttaggtgctgaaataaccacatctggaaggcttactcgcttagccatttaattacggaactatttttttatacttctaatgagcaagtagaaaacctctcatctacaaaaacatactcgtgtccataatcctctaccatagttacacgttttttagatctcatatgtgctaaaaagttttcccatactaattggttactattatttttcgtataatttttaacagtttgaggttttagatttttagttacagaagtgatatcgaatattttatccaaaaagaatgaataattaattgtcttagaaggagtgttttcttggcaaaagaataccaagtgcttaaatatttctactacttcattaatcttttctgtactcagattcagtttctcatcttttacttgattgattatttcaaagactaacttataatcctttttatttattctctcgttagccttaagaaaactagatacaaaatttgcatctacatcatccgtggatatttgatttttttccatgatatccaagagttccgagataatttctccagaacattgatgagacaataatctccgcaatacatttctcaaatgaataagtttattagacacatggaagtttgactttttttgtacctttgtacatttttgaaataccgactcgcaaaaaatacaatattcatatccttgttcagatactataccgttgtgtctacaaccgctacataatcgtagattcatgttaacactctacgtatctcgtcgtccaatattttatataaaaacattttatttctagacgttgccagaaaatcctgtaatatttttagttttttgggctgtgaataaagtatcgccctaatattgttaccgtcttccgccaatatagtagttaaattatccgcacatgcaaaagaacaccgcttaggcggattcagtacaatgttatatttttcgtaccaactcatttaaatatcataatctaaaatagttctgtaatatgtctagcgctaatatattgatcataatcctgtgcataaattaagatacaacaatgtctcgaaatcatcgacatggcttcttccatagttagaagatcgtcgtcaaagttagcaacgtgattcatcaacatttgctgttttgaggcagcaaatactgaaccgtcgccattcaaccattcataaaaaccatcgtctgaatccattgataatttcttgtactggtttttgagagctcgcatcaatctagcatttctagctcccggattgaaaacagaaagaggatcgtacatccagggtccattttctgtaaatagaatcgtataatgtcccttcaagaagatatcagacgatccacaatcaaagaattggtctccgagtttgtaacaaactgcggactttaacctatacatgataccgtttagcatgatttctggtgatacgtcaatcggagtatcatctattagagatctaaagccggtgtaacattctccaccaaacatattcttattctgacgtcgttctacataaaacatcattgctccattaacgataacaggggaatgaacagcactacccatcacattagttcccaatggatcaatgtgtgtaactccagaacatcttccatatcctatgttaggaggagcgaacaccactcttccactattgccatcgaatgccatagaataaatatccttggaattgatagaaatcggactgtcggatgttgtgatcatcttcataggattaacaactatgtatggtgccgcctgaagtttcatatcgtaactgatgccgtttataggtctagccacagaaaccaacgtaggtctaaatccaactatagacaaaatagaagccaatatctgttcctcatctgtcataacttgagagcatccagtatgaataatcttcattagatggggatctaccgcatcatcatcgttacaataaaaaattcccattctaatgttcataattgcttttctaatcatggtatgcatgtttgctctctgaatctctgtggaaattagatctgatacacctgtaatcactatcggattatcctccgtaagacgattaaccaacaacatataattataagactttacttttctaaattcataaagttgctggattaggctataggtgtctccatgtacatacgcgttctcgagcgcaggaagtttaataccgaatagtgccatcagaataggatgaatatagtaattagtttctggttttctataaataaaagacaaatcttgtgaactagacatatcggtaaaatgcatggattggaatcgtgtagtcgacagaagaatatgatgattagatggagagtatattttatctaactctttgagttggtcaccgattctaggactagctcgagaatgaataagtactaaaggatgagtacatttcacagaaacactagcattgttcaatgtgctctttacatgggtaaggagttgaaatagctcgtttctatttgttctgacaatatttagtttattcataatgttaagcatatcctgaatagtaaagttagatgtgtcatacttgttagtagttagatatttagcaattgcattcccatcatttctcaatctcgtactccaatcatgtgtagatgctacttcgtcgatggaaaccatacaatcctttttgataggctgttgagattgattatttcctgcacgtttaggtttggtacgttgatttctagcccctgcggatataaagtcatcgtctacaatttgggacaatgaattgcatacactacaagacaaagatttatcagaagtgtgaatatgatcttcatctaccaaagaaagagtttgattagtataactagattttagtcctgcgttagatgttaaaaaaacatcgctattgaccacggcttccattatttatattcgtagtttttactcgaaagcgtgattttaatatccaatcttattacttttggaatcgttcaaaacctttgactagttgtagaatttgatctattgccctacgcgtatactcccttgcatcatatacgttcgtcaccagatcgtttgtttcggcctgaagttggtgcatatctctttcaacattcgacatgagatccttaagggccatatcgtctagattttgttgagatgctgctcctggatttggattttgttgtgctgttgtacatactgtaccaccagtaggtgtaggagtacatacagtggccacaataggaggttgaggaggtgtaaccgttggagtagtacaagaaatatttccatccgattgttgtgtacatgtagttgttggtaacgtctgagaaggttgggtagatggcggtgtcgtcgtcttttgatctttattaaatttagagataatatcctgaacagcattgctcggcgtcaacgctggaaggagtgaactcgccggcgcatcagtatcttcagacagccaatcaaaaagattagacatatcagatgatgtattagtttgttgtcgtggttttggtgtaggaacagtactactaggtagaagaataggagccggtgtagctgttggaaccggctgtggagttatatgaatagttggttgtagcggttggataggctgtctgctggcgaccgtcatattatctctagctagttgttctcgcaactgtctttgataatacgactcttgagactttagtcctatttcaatcgcttcatcctttttcgtatccggatccttttcttcagaataatagattgacgactttggtgtagaggattctgccagcccctgtgagaacttgttaaagaagtccatttaaggctttaaaattgaattgcgattataagattaaatggcagacacagacgatattatcgactatgaatccgatgatctcaccgaatacgaggatgatgaagaagaggaagaagatggagagtcactagaaactagtgatatagatcccaaatcttcttataagattgtagaatcagcatccactcatatagaagatgcgcattccaatcttaaacatatagggaatcatatatctgctcttaaacgacgctatactagacgtataagtctatttgaaatagcgggtataatagcagaaagctataacttgcttcaacgaggaagattacctctagtttcagaattttctgacgaaacgatgaagcaaaatatgctacatgtaattatacaagagatagaggagggttcttgtcctatagtcatcgaaaagaacggagaattgttgtcggtaaacgattttgacaaagatggtctaaaattccatctagactatattatcaaaatttggaaacttcaaaaacgatattagaatttatacgaatatcgttctctaaatgtcacaatcaagtctcgcatgttcagcaatttattgtcgtactttatatcgtgttcattaacgatatcttgcaaaatagtaatgattctatcttccttcgatagatattcttcagagattattgtcttatattttttcttgttatccgatatgaatttgataagactttgaacattattgatacccgtctgtttaattttttctacagatattttagttttggcagattctatcgtatctgtcaatagacatccaacatcgacattcgacgtcaattgtctataaatcaacgtataaattttagaaataacattagcgaattgttgtgcattgatgtcgttattctgaaacagtatgattttaggtagcattttcttaacaaagagaacgtatttattgttactcagttgaacagatgatatatccagattactaacgcatctgattccgtataccaaactttcagaagaaatggtgtacaattgtttgtattcattcaatgtctctttttcagaaattagtttagagtcgaatactgcaataattttcaagagatagttttcatcagataagattttatttagtgtagatatgataaaactattgttttgttggagaacttgatacgccgcgttctctgtagtcgacgctctcaaatgggaaacaatctccattatttttttggaatcggatactatatcttcggtatcttgacgcagtctagtatacatagagttaagagagattagagtttgtacattaagcaacatgtctctaaatgtggctacaaacttttcctttttcacataatctagtttattatataccgatttcacaacggcaccagatttaaggaaccagaatgaaaaactctgataactacaatatttcatcatagttacgattttatcatcttctatagttggtgtaatagcgcatacctttttctccaagactggaaccaacgtcataaaaatgtttaaatcaaaatccatatcaacatctgatgcgctaagaccagtctcgcgttcaagattatctttactaatggtgacgaactcatcatatagaactctaagtttgtccattatttatttacagatttagttgtttaatttatttgtgctcttccagagttgggatagtatttttctaacgtcggtattatattattaggatctacgttcatatgtatcataatattaatcatccacgttttgataaatctatctttagcttctgaaataacgtatttaaacaaaggagaaaaatatttagctacggcatcagacgcaataacattttttgtaaatgtaacgtatttagacgacagatcttcgttaaaaagttttccatctatgtagaatccatcggttgttaacaccattcccgcgtcagattgaataggagtttgaatagtttgttttggaaatagatccttcaataacttatagttgggtgggaaaaaatcgattttatcactagactctttcttttttactatcattacctcatgaactatttcttgaatgagtatatgtattttctttcctatatcggacgcgttcattggaaaatataccatgtcgttaactataagaatatttttatcctcgtttacaaactgaataatatcagatgtagttcgtaaacgaactatatcatcaccagcacaacatctaactatatgatatccactagtttcctttagccgtttattatcttgttccatattagcagtcattccatcatttaagaaggcgtcaaagataatagggagaaatgacattttggattctgttacgactttaccaaaattaaggatatacggacttactatctttttctcaacgtcgatttgatgaacacacgatgaaaatgtgcttctatgagattgatcatgtagaaaacaacaagggatacaatatttccgcatatcatgaaatatattaagaaatcccaccttattatatttccccaaaggatccatgcatgtaaacattatgccgttatcattaataaagacttctttctcatcggatttgtaaaagttgttactgatttttttcattccaggatctagataattaataatgatgggttttctattcttattctttgtattttggcatatcctagaccagtaaacagtttccactttggtaaaatcagcagacttttgaacgctattaaacatggcattaatggcaataactaaaaatgtaaaatatttttctatgttaggaatatggtttttcactttaatagatatatggtttttggccaaaatgatagatatttttttatccgaggatagtaaaatattattagtcgccgtctctataaaaatgaagctagtctcgatatccaattttattctagaattgataggagtcgccaaatgtaccttatacgttatatctcccttgatgcgttccatttgtgtatctatatcggacacaagatctgtaaatagttttacgttattaatcatcacggtatcgccgtcgctagataacgctaatgtaccatccaagtcccaaatggagagatttaactgttcatcgtttagaataaaatgattaccggtcatattaataaagtgttcatcgtatctagataacaacgacttataattaatgtccaagtcttgaactcgctgaatgatcttttttaacccagttagttttagattggtacgaaatatattgttaaactttgattctacagtaatgtccaaatctagttgtggaaatacttccatcaacattgtttcaaacttgataatattattatctacatcttcatacgatccaaattccggaatagatgtatcacatgctcttgccacccagataaccaaaaagtcacacgctccaggatatacattgtataaaaagctatcgttttttagtagtgtttttttctgagtatatacgaagggattaaaaatagtattatcaacgtaactatattccaaattattcttatgagaatagataataatatcgtccttaatatctaacaaatttcctaaatatccctttaattgagtcattcgaagcgtcaatagaatatgtctcttaactatttccggctgttgtatatttaaatgacttcgtaaaaaataatatatgggcgacttctcatctatgtaatcatatggagtgagatatagggctcgttctacctcctgccccttacccacctgtaataccaattgcggacttactatatatcgcatatttatatcgtggggtaaagtgaaaatctactaccgatgatgtaagtcttacaatgttcgaaccagtaccagatcttaatttggaggcctccgtagaactaggggaggtaaatatagatcaaacaacacctatgataaaggaaaatagcggttttatatcccgtagtagacgtctattcgcccatagatctaaggatgatgagagaaaactagcactacgattctttttacaaagactttattttttagatcatagagagattcattatttgttcagatgcgttgacgctgtaaaagacgtcactattaccaaaaaaaataacattatcgtggcgccttatatagcacttttaactatcgcatcaaaaggatgcaaacttacagaaacaatgattgaagcattttttccagaactatataatgaacatagtaagaaatttaaattcaactctcaagtatccatcatccaagaaaaactcggataccagtttggaaactatcacgtttatgattttgaaccgtattactctacagtagctctggctattcgagatgaacattcatctggcatttttaatatccgtcaagagagttatctggtaagttcattatctgaaataacatatagattttatctaattaatctaaaatctgatcttgttcaatggagtgctagtacgggcgctgtaattaatcaaatggtaaatactgtattgattacagtgtatgaaaagttacaactggtcatagaaaatgattcacaatttacatgttcattggctgtggaatcaaaacttccaataaaattacttaaagatagaaatgaattatttacaaaattcattaacgagttaaaaaagaccagttcattcaagataagcaaacgcgataaggatacgctactaaaatattttacttaggactggagttagaatttatagacgactcatttcgtttatcattgttactattattactattactatcattattagtgttggcattattagtattcttcttgtcatcttgttcagaaatatacagcaatgctatacctaatactaaatacattatcatgctcgcaatggctctaacaacaacgaaccaaaatgaatttggtcgtagcttttgttcacaaaaatacataaagaaatgtctacataaatctatggcgccattggctacttgaaatagcgccagtcctcctacagattttaatatagctgtataacatgacatttattcatcatcaaaagagacagagtcaccatctgtcatatttagattttttttcatgtgttcaaagtatcctctactcatttcattataatagtttatcatacttagaattttaggacggatcaatgagtaagacttgactagatcgtcagtagtaatttgtgcatcgtctattctgcatccgcttcgtcgaataatgtatagcatcgctttgagattctccatagctatcaagtctttatacaatgacatggaaatatctgtgaatactttatacttctccaacatcgatgccttaacatcatcgcctactttagcattgaaaatacgttctattgtgtagatggatgtagcaagatttttaaacaacaatgccatcttacacgatgattgcctcaagtctccaatcttttgtttagaacgattagctacagagttcaacgcttggctgactagcatattattatctttagaaattgtattcttcaatgaggcgtttatcatatctgtgatttcgttagtcatattacagtctgactgggttgtaatgttatccaacatatcacctatggatacggtacacgtaccagcatttgtaataatcctatctaagatgttgtatggcattgcgcagaaaatatcttctcctgtaatatctccactctcgataaatctactcagattattcttaaatgccttattctctggagaaaagatatcagtgtccatcatttcattaatagtatacgcagaaaagataccacgagtatcaattctatccaagatacttatcggttccgagtcacagataatggtttcctctccttcgggagatcctgcatagaaatatctaggacaatagtttctatactgtctgtaactctgataatctctaaagtcactaactgataccatgaaattgagaagatcaaacgctgaagtaatcaatttttctgcctcgtttttactacaactagttttcatcaatgtagcgacgatgtattgtttagttactcttggtctaatactgatgatagagatattattgcttcccataatggatcttctagtagtcaccttaaagcccattgatgcgaatagcagatagataaagtcttggtatgactcctttctaatatagtacggactacctttgtcacccaactttatacccacataagccataacaacctctttaatagccgtttcatgaggtttatcagccatgagcctgagtagttggaagaatctcatgaatcccgtctcagaaagtcctatatgcatgatagatttatctttcctgggaaactctcgtatagtcatagatgaaatactcttcaaagtttctgaaataagattagtaacagtcttacctccgactactctgggtaacaaacatactctaataggtgttttctctgcggagataatatcagaaaggatagagcaataagtagtattattgtgattataaagaccgaatacataacaggtagaatttataaacatcatgtcctgaaggtttttagacttgtattcctcgtaatccataccgtcccaaaacatggatttggtaactttgatagccgtagatctttgttccttcgccaacaggttaaagaaattaataaagaatttgttgtttctatttatgtccacaaattgcacgtttggaagcgccacggttacattcactgcagcattttgaggatcgcgagtatgaagtacgatgttattgtttactggtatatctggaaagaaatctaccagtctaggaataagagattgatatcgcatagaaatagtaaagtttataatctcatcatcgaagagcattttgttaccattgtaataaatatccactctgtcatatgtataaatgaagtactgttcaaacatgatgagatgtttatatgttggcatagtagtgagatcgacgtttggtaatggcaatgtattaagattaactccataatgtctagcagcatctgcgatgttataagcgtcgtcaaagcggggtcgatcttgtattgttatatattgtctaacacctataagattatcaaaatcttgtctgcttaatacaccgttaacaatttttgccttgaattcttttattggtgcattaataacatccttatagaggatgttaaacaaataagtgttatcaaagttaagatctggatatttcttttctgctagaacatccattgagtcggagccatctggtttaatataaccaccgataaatctagctctgtattctgtatccgtcaatctaatattaagaaggtgttgagtgaaaggtggaagatcgtaaaagctgtgagtattaatgataggattagtttccgaactaatgttaattggggtattaataatatctatatttccagcgttaagtgtaacattaaacagttttaattcacgtgacgtggtatcaattaaataattaatgcccaatttggatatagcagcctgaagctcatcttgtttagttacggatcctaatgagttattaagcaatatatcgaacggatgaacgaaggttgttttaagttggtcacatactttgtaatctagacatagatgcggaagaacggtagaaactatacgaaataaatattcagagtcctctaattgatcaagagtaactattgacttaataggcatcatttatttagtattaaatgacgaccgtaccagtgacggatatacaaaacgatttaattacagagttttcagaagataattatccatctaacaaaaattatgaaataactcttcgtcaaatgtctattctaactcacgttaacaacgtggtagatagagaacataatgccgccgtagtgtcatctccagaggaaatatcctcacaacttaatgaagatctatttccagatgatgattcaccggccactattatcgaacgagtacaacctcatactactattattgacgatactccacctcctacttttcgtagagagttattgatatcggaacaacgtcaacaacgagaaaaaagatttaatattacagtatcgaaaaatgctgaagcaataatggaatctagatctatgataacttctatgccaacacaaacaccatccttgggagtagtttatgataaagataaaagaattcagatgttggaggatgaagtggttaatcttagaaatcaacgatctaatacaaaatcatctgataatttagataattttaccaaaatactatttggtaagactccgtataaatcaacagaagttaataagcgtatagccatcgttaattatgcaaatttgaacgggtctcccttatcagtcgaggacttggatgtttgttcagaggatgaaatagatagaatctataaaacgattaaacaatatcacgaaagtagaaaacaaaaaattatcgtcactaacgtgattattattgtcataaacattatcgagcaagcattgctaaaactcggatttgaagaaatcaaaggactgagtaccgatatcacttcagaaattatcgatgtggagatcggagatgactgcgatgctgtagcatcaaaactaggaatcggtaacagtccggttcttaatattgtattgtttatactcaagatattcgttaaacgaattaaaattatttaatttaatacattcccatatccagacaacaatcgtctggattaatctgttcctgtcgtctcataccggacgacatattaatctttttattagtaggcatctttttagatggtttctttttcccagcattaactgagtcgatacctagaagatcgtgattgatctctccgaccattccacgaacttctaattggccgtctctaacggtaccataaactattttaccagcattagtaacagcttggacaatctgaccatccatcgcattgtacgatgtagtagtaactgttgttctacgtctaggagcaccagaagtatttttggagcccttggaggctgatgtagaagaagacgaggattttgattttggtttacatgtaatacattttgaactctttgattttgtatcacatgcgccggcagtcacatctgtttgagaattaagattattgttgcctcctttgacggctgcatctccaccgatttgcgctagtagatttttaagctgtggtgtaatcttattaactgtttcgatataatcatcgtaactgcttctaacggctaaattttttttatccgccatttagaagctaaaaatatttttatttatacagaagatttaactagattatacaatgaactaatatgatccttttccagattatttacaaacttggtattttttggttctggaggaggcgaatttaaattcggacttggattcggattttgtgagttcttgatcttattatacatcgagtataggatggcgacggtaactgctacacaaataccgatcaacaaaagaataccaatcatttattgacaataacttcactattgatcaagtatgcaatatatcatcttttcactaaataagtagtaataatgattcaacaatgtcgagatatatggacgataataatttagttcatggaaatatcgctatgattggtatgaatgactccgctaactctgtggggcgcgcagtgctttccccacatagaataaattagcattccgactgtgataataataccaagtataaacgccataatactcaatactttccatgtacgagtgggactggtagacttactaaagtcaataaaggcgaagatacacgaaagaatcaaaagaatgattccagcgattagcacgccggaaaaataatttccaatcataagcatcatgtccatttaactaataaaaattttaaatcgccgaatgaacaaagtggaatataaaccatataaaaacaatagtttgtactgcaaaaataatatctatttttgttttcgaagatatggtaaaattaaatagtagtacacagcatgttataactaacagcagcaacggctcgtaattacttatcatttactagacgaaaaggtggtgggatattttcttgctcaaataatacgaatatatcacccatccattttatgcgatgtttatatactctaatctttaatagatctatagacgacgggtttaccaacaatatagattttatcgattcatctaatttaaacccttccttaaacgtgaatgatctattatctggcataacgatgaccctacctgatgaatcggacaatgtactgggccatgtagaataaattatcaacgaattatcgtctacgaacatttatatcatttgttttaattttaggacgcgaataaatagatataaaatagaaaataacagatattacaaccagtgttatggccgcgcccaaccaggtaggcagttttattttatcttttactacaggttctcctggatgtacgtcaccaacggcggacgtagttctagtacaattagacgtaagttccgcttgggaattttttaacgctaaagagttaacgttaatcgtgcacccaacgtatttacatctagttctttgaacatcttgattataatataaccattttctatctctagattcgtcggtgcactcatgtaaccaacataccctaggtcctaaatatttatctccggaattagattttggataattcgcgcaccaacaatttctatttcctttatgatcgttacaaaagacgtataatgccgtatccccaaaagtaaaataatcaggacgaataattctaataaactcagaacaatatctcgcatccatatgtttggagcaaatatcggaataagtagacatagccggtttccgttttgcacgtaaccattctaaacaattggggtttccaggatcgtttctacaaaatccagtcatgaaatcgtcacaatgttctgtcttgtaattattattaaatatttttggacagtgtttggtatttgtcttagaacaacattttgccacgctatcactatcgcccaggagataatccttttttataaaatgacatcgttgcccggatgctatataatcagtagcgtgttttaaatccttaatatattcaggagttacctcgttctgataatagattaatgatccaggacgaaatttgaaagaactacatggttctccatgaattaatacatattgtttagcaaattcaggaactataaaactactacaatgatctatcgacataccatctatcaaacaaaacttgggtttaatttctcccggagatgtttcataatagtacgtataactttcttctgcaaacttaacagctctattatattcaggataattaaaacctaattccatatatttgtctcgtatatctgctattcctggtgctattttgattctattaagagtaacagctgcccccattcttaataatcgtcagtatttaaactgttaaatgttggtatatcaacatctaccttatttcccgcagtataaggtttgttgcaggtatactgttcaggaatggttacatttatacttcttctatagtcctgtctttcgatgttcatcacatatgcaaagaacagaataaacaaaataatgtaagaaataatattaaatatctgtgaattcgtaaatacattgattgccataataattacagcagctacaatacacacaatagacattcccacagtgttgccattacctccacgatacatttgagttactaagcaataggtaataactaagctagtaagaggcaatagaaaagatgagataaatatcatcaatatagagattagaggagggctatatagagccaagacgaacaaaatcaaaccgagtaacgttctaacatcattatttttgaagattcccaaataatcattcattcctccataatcgttttgcatcatacctccatctttaggcataaacgattgctgctgttcctctgtaaataaatctttatcaagcactccagcacccgcagagaagtcgtcaagcatattgtaatatcttaaataactcatttatatattaaaaaatgtcactattaaagatggagtataatctttatgccgaactaaaaaaaatgacttgtggtcaacccctaagtctttttaacgaagacggggatttcgtagaagttgaaccgggatcatcctttaagtttctgatacctaagggattttacgcctctccttccgtaaagacgagtctagtatttgaaacattaacaacgaccgataataaaatcactagtatcaatccaacaaatgcgccaaagttatatcctcttcaacgcaaagtcgtatctgaagtagtttctaatatgaggaaaatgatcgaatcaaaacgtcctctatacattactcttcacttggcgtgtggatttggtaagactattaccacgtgttatcttatggctacacacggtagaaaaaccgtcatttgcgtacccaataaaatgttaatacatcaatggaagacacaggtagaggcagtcggattggaacataagatatccatagatggagtaagtagtctattaaaggaactaaagactcaaagtccggatgtattaatagtagtcagtagacatctgacaaacgatgccttttgtaaatatatcaataagcattatgatttgttcatcttggatgaatcacatacgtataatctgatgaacaatacagcagttacaagatttttagcgtattatcctccgatgatgtgttattttttaactgctacacctagaccagctaaccgaatttattgtaacagtattattaatattgccaagttatccgatctaaaaaaaactatctatgcggtagatagtttttttgagccatattccacagacaatattagacatatggtaaaacgactagatggaccatctaataaatatcatatatataccgagaagttattatctgtagacgagcctagaaatcaacttattcttaataccctggtagaagaattcaagtcaggaactattaatcgcattttagttattactaaactacgtgaacatatggtattattctacaaacgattattagatcttttcggaccagaggttgtatttataggagacgcccaaaatagacgtactccagatatggtcaaatcaatcaaggaactaaatagatttatattcgtatccaccttattttattccggtactggtttagatattcctagtttggattcgttgttcatttgctcggcagtaatcaacaatatgcaaatagagcaattactagggagggtatgtcgagaaacagaactattagataggacggtatatgtatttcctaacacatccatcaaagaaataaagtacatgataggaaatttcatgcaacgaattattagtctgtctgtagataaactaggatttaaacaagaaagttatcggaaacatcaagaatccgatcccacttctgtatgtacaacatcctccagagaagaacgtgtattaaatagaatatttaactcgcaaaatcgttaagaagtttaagcgacgatccgcatgctgcgcaggccagtgtattacccctcatagtattaatataatccaatgatacttttgtgatgtcggaaatcttaaccaatttagactgacaggcagaacacgtcatgcaatcatcatcgtcatcgataactgtagtcttgggcttctttttgcggctcttcattccggaacgcacattggtgctatccatttaggtagtaaaaaataagtcagaatatgccctataacacgatcgtgcaaaacctggtatatcgtctctatctttatcacaatatagtgtatcgacatctttattattattgacctcgtttatcttggaacatggaatgggaacatttttgttatcaacggccacctttgccttaattccagatgttgtaaaattataactaaacagtctatcatcgacacaaatgaaattcttgtttagacgtttgtagtttacgtatgcggctcgttcgcgtctcattttttcagatattgcaggtactataatattaaaaataagaatgaaataacataggattaaaaataaagttatcatgacttctagcgctgatttaactaacttaaaagaattacttagtctgtacaaaagtttgaaattttcagattctgcggctatagaaaagtataattctttggtagaatggggaacatctacttactggaaaataggcgtgcaaaaggtagctaatgtcgagacgtcaatatctgattattatgatgaggtaaaaaataaaccgtttaatattgatccgggctattacattttcttaccggtatattttgggagcgtctttatttattcgaagggtaaaaatatggtagaacttggatctggaaactcttttcaaataccagatgatatgcgaagtgcgtgtaacaaagtattagacagcgataacggaatagactttctgagatttgttttgttaaacaatagatggataatggaagatgctatatcaaaatatcagtctccagttaatatatttaaactagctagtgagtacggattaaacatacccaaatatttagaaattgaaatagaggaagacacattatttgacgacgagttatactctattatagaacgctcttttgatgataaatttccaaaaatatccatatcgtatattaagttgggagaacttaggcggcaagttgtagactttttcaaattctcgttcatgtatattgagtccatcaaggtagatcgtataggagataatatttttattcctagcgttataacaaaatcaggaaaaaagatattagtaaaagatgtagaccatttaatacgatctaaggttagagaacatacatttgtaaaagtaaaaaagaaaaacacattttccattttatacgactatgatgggaacggaacagaaactagaggagaagtaataaaacgaattatagacactataggacgagactattatgttaacggaaagtatttctctaaggttggtagtgcaggcttaaagcaattgactaataaattagatattaatgagtgcgcaactgtcgatgagttagttgatgagattaataaatccggaactgtaaaacgaaaaataaaaaaccaatcagcatttgatttaagcagagaatgtttgggatatccagaagcagattttataacgttagttaataacatgcggttcaaaatagaaaattgtaaggttgtaaatttcaatattgaaaatactaattgtttaaataacccgagtattgaaactatatatggaaactttaaccagttcgtctcaatctttaatatcgtcaccgatgtcaaaaaaagattattcgagtgaaataatatgcgcctttgatataggtgcaaaaaatcctgccagaactgttttagaagtcaaggataactccgttagggtattggatatatcaaaattagactggagttctgattgggaaaggcgcatagctaaagatttgtcacaatatgaatacactacagttcttctagaacgtcagcctagaaggtcgccgtatgttaaatttatctattttattaaaggctttttatatcatacatcggctgccaaagttatttgcgtctcgcctgtcatgtctggtaattcatatagagatcgaaaaaagagatcggtcgaagcatttcttgattggatggacacattcggattgcgagactccgttccggatagacgcaaattagacgatgtagcggatagtttcaatttggctatgagatacgtattagataaatggaatactaattatacaccttataataggtgtaaatctagaaattacataaaaaaaatgtaataacgttagtaacgccattatggataatctatttacctttctacatgaaatagaagatagatatgccagaactatttttaactttcatctaataagttgcgatgaaataggagatatatatggtcttatgaaagaacgcatttcctcagaggatatgtttgataatatagtatataataaagatatacatcctgccattaagaaactagtgtattgcgacatccaacttactaaacacattattaatcagaatacgtatccggtatttaacgattcttcacaagtgaaatgttgtcattatttcgacataaactcagataatagcaatattagctctcgtacagtagagatatttgagagggaaaagtcatctcttgtatcatatattaaaactaccaataagaagagaaaggtcaattacggcgaaataaagaaaactgttcatggaggcactaatgcaaattacttttccggtaaaaagtctgacgagtatctgagtactacagttagatccaacattaatcaaccttggatcaaaaccatttctaagagaatgagagtagatatcattaatcactctatagtaacgcgtggaaaaagctctatattacaaactatagaaattatttttactaatagaacatgtgtgaaaatattcaaggattctactatgcacattattctatccaaggacaaggatgaaaaggggtgtatacacatgattgacaaattattctatgtctattataatttatttctgttgttcgaagatatcatccaaaacgagtactttaaagaagtagctaatgttgtaaaccacgtacttacggctacggcattagatgagaaattattcctaattaagaaaatggctgaacacgatgtttatggagttagcaatttcaaaatagggatgtttaacctgacatttattaagtcgttggatcataccgttttcccctctctgttagatgaggatagcaaaataaagttttttaaggggaaaaagctcaatattgtagcattacgatctctggaggattgtataaattacgtgactaaatccgagaatatgatagaaatgatgaaggaaagatcgactattttaaatagcatagatatagaaacggaatcggtagatcgtctaaaagaattgcttctaaaatgaaaaaaaacactgattcagaaatggatcaacgactagggtataagtttttggtgcctgatcctaaagccggagttttttatagaccgttacatttccaatatgtatcgtattctaattttatattgcatcgattgcatgaaatcttgaccgtcaagcggccactcttatcgtttaagaataatacagaacgaattatgatagaaattagcaatgttaaagtgactcctccagattactcacctataatcgcgagtattaaaggtaagagttatgatgcattagccacgttcactgtaaatatctttaaagaggtaatgaccaaagagggtatatccatcactaaaataagtagttatgagggaaaagattctcatttgataaaaattccgctactaataggatacgggaataaaaatccacttgatacagccaagtatcttgttcctaatgtcataggtggagtctttatcaataaacaatctgtcgaaaaagtaggaattaatctagtagaaaagattacaacatggccaaaatttagggttgttaagccaaactcattcactttctcgttttcctccgtatcccctcctaatgtattaccgacaagatatcgccattacaagatatctctggatatatcacaattggaagcgttgaatatatcatcgacaaagacatttataacggtcaatattgttttgctgtctcaatatttatctagagtgagtctagaattcattagacgtagtttatcatacgatatgcctccagaagttgtctatctagtaaacgcgataatagatagtgctaaacgaattactgaatctattactgactttaatattgatacatacattaatgacctggtggaagctgaacacattaaacaaaaatctcagttaacgatcaacgagttcaaatatgaaatgctgcataactttttacctcatatgaactatacacccgatcaactaaagggattttatatgatatctttactaagaaagtttctctactgtatctaccacacttctagatatccagatagagattcgatggtttgtcatcgcatcctaacgtacggcaaatattttgagacgttggcacatgatgaattagagaattacataggcaacatccgaaacgatatcatgaacaatcacaagaacagaggcacttacgcggtaaacattcatgtactaacaactcccggacttaatcacgcgttttctagcttattgagtggaaagttcaaaaagtcagacggtagttatcgaacacatcctcactattcatggatgcagaatatttctattcctaggagtgttggattttatccggatcaagtaaagatttcaaagatgttttctgtcagaaaataccatccaagtcaatatctttacttttgttcatcggacgttccggaaagaggtcctcaggtaggtttagtatctcaattgtctgtcttgagttccattacaaatatactaacgtctgagtatttggatttggaaaagaaaatttgtgagtatatcagatcatattataaagatgatataagttactttgaaacaggatttccaatcactatagaaaatgctctagtcgcatctcttaatccaaatatgatatgtgattttgtaactgactttagacgtagaaaacggatgggattcttcggtaacttggaggtaggtattactttagttagggatcacatgaatgaaattcgcattaatattggagcgggaagattagtcagaccattcttggttgtggataacggagagctcatgatggatgtgtgtccggagttagaaagcagattagacgacatgacattctctgacattcagaaagagtttccgcatgtcatcgaaatggtagatatagaacaatttacttttagtaacgtatgtgaatcggttcaaaaatttagaatgatgtcaaaggatgaaagaaagcaatacgatttatgtgactttcctgccgaatttagagatggatatgtggcatcttcattagtgggaatcaatcacaattctggacccagagctattcttggatgtgctcaagctaaacaagctatctcttgtctgagttcggatatacgaaataaaatagacaatggaattcatttgatgtatccagagaggccaatcgtgattagtaaggctttagaaacttcaaagattgcggctaattgcttcggccaacatgttactatagcattaatgtcgtacaaaggtatcaatcaagaggatggaattatcatcaaaaaacaatttattcagagaggcggtctcgatatagttaccgcaaagaaacatcaagtagaaattccgttggaaaactttaataacaaagaaagagataggtctaacgcctattcaaaattagaaagtaatggattagttagactgaatgctttcttggaatccggagacgctatggcacgaaatatctcatcaagaactcttgaagatgattttgctagagataatcagattagcttcgatgtttccgagaaatataccgatatgtacaaatctcgcgttgaacgagtacaagtagaacttactgacaaagttaaggtacgagtattaaccatgaaagaaagaagacccattctaggagataaatttaccactagaacgagtcaaaagggaacagtcgcgtatgtcgcggatgaaacggaacttccatacgacgaaaatggtatcacaccagatgtcattattaattctacatccatcttctctagaaaaactatatctatgttgatagaggttattttaacagccgcatattctgctaagccgtacaacaataagggagaaaaccgacctgtctgttttcctagtagtaacgaaacatccatcgatacatatatgcaattcgctaaacaatgttatgagcattcaaatccgaaattgtccgatgaagaattatcggataaaatcttttgtgaaaagattctctatgatcctgaaacggataagccttatgcatccaaagtattttttggaccaatttattacttgcgtctgaggcatttaactcaggacaaggcaaccgttagatgtagaggtaaaaagacgaagctcattagacaggcgaatgagggacgaaaacgtggaggaggtatcaagttcggagaaatggagagagactgtttaatagcgcatggcgcagccaatactattacagaagttttaaaagactcagaagaggattatcaagatgtgtatgtttgtgaaaattgtggagacatagcagcacaaatcaagggtattaatacatgtcttagatgttcaaaacttaatctctctcctctcttaacaaaaattgataccacgcacgtatctaaagtatttcttactcaaatgaacgccagaggcgtaaaagtcaaattagatttcgaacgaaggcctccttcgttttataaaccattagataaagttgatctcaagccgtcttttctggtgtaatattctagtttggtagtagatacatatcaatatcatcaaattcgagatccgaattataaaatgggcgtggattgttaactatagaatcggacgtctgatattcgaaaatctgtggagttttaggttttggtggaggtgtaactgctacttgggatactgaagtctgatattcagaaagctgggggatgttctggttcgacatccaccgatggtgtcacatcactaatcggttcggtaacgtctgtggatggaggtgctacttctacagaacctgtagcctcagttgtcaacggagatacatttttaatgcgaggaaatgtataatttggtaatggtttctcatgtggatctgaagaagaggtaagatatctactagaaagataccgatcacgttctagttctcttttgtagaacttaactttttctttctcagcatctagttgatattccaacctcttcacgttactacgttcagattccaattcacgttcgcatgggttacctccgcagtttttacgagcgatttcacgttcagccttcatgcgtctctccttctctctatcgagtttatcagagcagtctttctgaaggcgatcgaactccataaatttctccaacgctttgattgtttccatagatttccgaagttcagcttttaggactgtgattctttttctttcgaattcacagctggatgtgcaaccgtttccattaccgccatctctaagtttcttttctagatcggcaacatttcatccccatgccttttacattcctcgagtctactgtcgtcgaaatatcgttccagctccttttcgacatcaataactttagcacgttgtctctcaagctctcttttgtagttatctgattccctggcacgtttaagatcttcatgcaattgagtcagctcttaacacaatctcttgcttcttcgtcatagtacttacaatcactatgggatccattgttaccacgtctacactcggcgagctcgcgtttaagagattcaatttcccgtttgtattggtccatgtttccattgctaccaccattagatttacaggctgctagttgtcgttcgagatcagaaatacgggttttcttggaattgatttcgtcgatgtacttggcatcgaaacacttattaagttctttttccaattctacgattttatttctttcgcgagtcaattccctcctgtagtaactatctgttttgtcagattcacgctctctacgtagactttcttgcaagttactaatttgttccctagcacgtccgagtttagttttatatgctgaatagagttctgattcatcctttgagcagatctctagcgatcgtttaagattcctgattctagtctttagcctatttacctcctcagaagatgttccgttaccgttgcgtttacactcgttaagctgtctatcaagatccatgattctatctctaagacgttgcatctctctttccatatcagcattgctttcattattacgtctgcagtcactcaactgtctttcaatatctgagattctatctctaagacgtcgcatctctctctgtttcggcattggtttcattattacgtctacagtcgttcaactgtctttcaagatctgatattctagattggagtctgctaatctctgtagcattttcacggcattcactcagttgtctttcaagatctgagattttagattggagtctgctaatctctgtaagatttcctcctccgctctcgatgcagtcggtcaacttattctctagttctctaatacgcgaacgcagtgcatcaacttcttgcgtgtcttcctggttgcgtgtacattcatcgagtctagattcgagatctctaacgcgtcgtcgttcttcctcaagttctctgcgtactacagaaagcgtgtccctatcttgttgatatttagcaatttctgattctagagtactgattttgcttacgtagttactaatagttgtcttggccttatcaagatcctccttgtatttgtcgcattccttgatatccctacgaagtctggacagttcccattcgacattacgacgtttatcgatttcagctcggagatcgtcatcgcgttgttttagccacatacgactgagttcaagttctcgttgacaagatccatctacttttccattcctaatagtatccagttccttttctagttctgaacgcatttctcgttccctatcaagcgattctctcaattctcggatagtcttcttatcaatttctaataaatctgaaccatcatctgtcccattttgaatatccctgtgttctttgatctcttttgtaagtcggtcgattctttcggttttataaacagaatccctttccaaagtcctaatcttactgagtttatcactaagttctgcattcaattcggtgagttttctcttggcttcttccaactctgttttaaactctccactatttccgcattcttcctcgcatttatctaaccattcaattagtttattaataactagttggtaatcagcgattcctatagccgttcttgtaattgtgggaacataattaggatcttctaatggattgtatggcttgatagcatcatctttatcattattagggggatggacaaccttaattggttggtcctcatctcctccagtagcgtgtggttcttcaataccagtgttagtaataggcttaggcaaatgcttgtcgtacgcgggcacttcctcatccatcaagtatttataatcgggttctacgtctgaatattcttttctaagagacgcgacttcgggagttagtagaagaactctgtttctgtatctatcaacgctggaatcaatactcaagttaaggatagcgaatacctcatcgtcatcatccgtatcttctgaaacaccatcatatgacatttcatgaagtctaacgtattgataaatagaatcagatttagtattaaacagatccttaacctttttagtaaacgcatatgtatattttagatctccagatttcataatatgatcacatgccttaaatgtcagtgcttccatgatataatctggaacactaatgggtgacgaaaaagatacagcaccatatgctacgttgataaataaatctgaaccactaagtagataatgattaatgttaaggaagaggaaatattcagtatatagatatgccttagcatcatatcttgtactaaacacgctaaacagtttattgatgtgatcaatttccaacagaataattagagcagcgggaataccaacaaacatattaccacatccgtattttctatgaatatcacatatcatgttaaaaaatcttgatagaagagcgaatatctcgtctgacttaatgagtcgtagttcagcagcaacataagtcataactgtaaatagaacatactttcctgtagtgttgattctagactccacatcaacaccattattaaaaatagttttatatacatctttaatctgctctccgttaatcgtcgaacgttctagtatacggaaacactttgatttcttatctgtagttaatgacttagtgatatcacgaagaatattacgaattacatttcttgtttttcttgagagacctgattcagaactcaactcatcgttccatagtttttttacctcagtggcgaaatctttggagtgcttggtacatttttcaataaggttcgtgacctccatttattataaaaaattttattcaaaacttaactacaatcgggtaattataaaatcgtagatctcccatgtggtggaatactaccatctatcgcatgtggatggacagtaggtaatggccatgggaacagtaatgtttgcatatttatctttcttgccagtattactgcatattgtcccaatgtttcgatgtgatgttctaacctatcaactgccgctgtatcacaacaatagtgtccgatgaaattaagattatgatccaatgtgtttaatatatgattatcaagtcttatacgatccgcgtcttttttgacaggatcaggttcttctacaggaagaagtttcggcctcttatgatattcatgtctgggaaacggtggtctagggtgaggctccggtatcggagtgggttttggattataatcatcatcgtctatgacatcatcttcgacttcgatatttattttgctatcttgatgatgtcctgtatcagttgcattttcagcactcgactgaatattagcgcattcattgtctattattaccatatttctaaacccaaaatgtatgtgttgaacatcagtactatcgttgatgagtcttatagcatgaattcgcttatcgttatcgggtttatcttctgtcaccttagcaattccttttttattaaactctacataatcatatccatttctattgtttgttctaatataaacgagtatagcatcattgctaaatttttcaatagtatcgaaaacagaatatcctaaaccatataatatatattcagggacactcaaactaaatgtccaggattctcctaaatacgtaaactttaatagtgcgaaatcattcaaaaatctaccacttatagatagatagtacataaatgcgtatagtagtctacctatctctttattatgaaaaccggcattacgatcatatatgtcgtgatatacctgtgatccgtttacgttaaaccataaatacatgggtgatcctataaacatgaatttatttctaattctcagagctatagttaattgaccgtgtaatatttgcttacatgcatacttgatacgctcattaataaaatttttatcattgctcgttatctcagaatcgtatatataaggagtaccatcgtgattcttaccagatattatacaaaatactatatataaaatatattgaccaacgttagtaatcatataaatgtttaacgttttaaattttgtattcaatgatccattatcatacgctagcatggtcttatgatattcattctttaaaatataatattgtgttagccattgcattggggctcctaatggagattttttattctcatccattttaggataggctttcataaagtccctaataacttcgtgaataatgtttctatgttttctactgatgcatgtatttgcttcgatttttttatcccatgtttcatctatcatagatttaaacgcagtaatgctcgcaacattaacatcttgaaccgttggtacaattccgttccataaatttataatgttcgccatttatataactcattttttgaatatacttttaattaacaaaagagttaagttactcatatgggcgccgtccagtctgaacatcaatctttttagccagagatatcatagccgctcttagagtttcagcgtgattttccaacctaaatagaacttcatcgttgcgtttacaacacttttctatttgttcaaactttgttgttacattagtaatctttttttccaaattagttagccgttgtttgagagtttcctcattgtcgtcttcatcggctttaacaattgcttcgcgtttagcctctggctttttagcagcctttgtagaaaaaaattcagttgctggaattgcaagatcgtcatctccggggaaaagagttccgtccatttaaagtacagattttagaaactgacactctgcgttatttatatttggtacaacacatggattataaatatcgatgttaataacatcagaaaatgtaaagtctatacattgttgcatcgtgttaaattttctaatggatctagtattattgggtccaacttctgcctgaaatccaaatatggaagcggatacaaaaccgtttcctggataaaccacacatctccacttttgctttacatcagaaattgtgtcgttgacatcttgaactctcctatctaatgccggtgttccacctatagattttgaatattcgaatgctgcatgagtagcattaaattccttaatattgccataattttcatatattgagtaaccctggataaaaagtaaacacaccgcagccgtcgctaccacaataaaaaaaattgatagagagttcatttataatctattagaagctgacaaaatttttttacacgcatcagacaatgctttaataaatagttcaacatctacttttgtcatatcgaaccgatggtatgattctaacctagaattacatccgaaaaagttgactatgttcatagtcattaagtcattaacaaacaacattccagactctggattataagacgatactgtttcgtcacaattacctaccttaatcatgtgattatgaatattggctattagagcaccttctaagaaatctataatatctttgaaacacgatttaaaatcaaaccacgaatatacttctacgaagaaagttagtttacccataggagaaataactataaatggagatctaaatacaaaatccggatctatgatagttttaacattattatattctctattaaatacctccacatctaaaaatgttaattttgaaactatgtcttcgtttattaccgtacctgaactaaacgctataagctctattgtttgagaactctttaaacgatattcttgaaatacatgtaacaaagtttcctttaactcggtcggtttatctaccatagttacagaatttgtatccttatctataatataataatcaaaatcgtataaagttatataattatcgcgttcagattgggatcttttcaaatagactaaaaaccccatttctctagtaagtatcttatgtatatgtttgtaaaatatcttcatggtgggaatatgctctaccgcagttagccattcctcattgacagcggtagatgtattagacaaaactattccaatgtttaacaagggccattttacgagattattaaatccttgtttgataaatgtagccaatgagggttcgagttcaacgacgattgaattctcttcccgcggatgctgcatgatgaacgacgggatgttgttcgattgatttggaattctttttcgactttttgtttatattaaatattttaaaatttatagcggatagcaattcatgtaccacggataatgtagacgcgtattgcgcatcgatatctttattattagataaatttatcaataaatgtgagaagtttgcctcgttaaggtcttccatttaaatattatataaacatttgtgtttgtatcttattcgtcttttatggaatagttttttactagtaaagctgcaattacacactttgtccgtaaaacataaatataaacaccagcttttatcaatcgttccaaaaagtcgacggcggacatttttaacatggcatctattttaaatacacttaggtttttggaaaaaacatcattttataattgtaacgattcaataactaaagaaaagattaagattaaacataagggaatgtcatttgtattttataagccaaagcattctaccgttgttaaatacttgtctggaggaggtatatatcatgatgatttggttgtattggggaaggtaacaattaataatctaaagatgatgctattttacatggatttatcatatcatggagtgacaagtagtggagcaatttacaaattgggatcgtctatcgatagactttctctaaataggactattgttacaaaagttaataattatgatgatacattttttgacgacgatgattgatcgctattgcacaattttgtttttttactttctaatatagcgtttagattctttttcatgtgcgaatattgatttactaaaatatcgatgtttaacttttgttctatgacgtccttatcagcggtatcggtacatatacgtaattcaccttcacaaaatacggagtcttcgataataatagccaatcgattattggatctagctgtctgtatcatattcaacatgtttaatatatcctttcgtttcccctttacaggcatcgatcgtagcatattttccgcgtctgagatggaaatgttaaaactacaaaaatgcgtaatgttagcccgtcctaatattggtacgtgtctataagtttggcatagtagaataatagacgtgtttaaatgccttccaaagtttaagaattctattagagtattgcattttgatagtttatcacctacatcatcaaaaataagtaaaaagtgtgctgattttttatgattttgtgcgacagcaatacatttttctatgttacttttagttcgtatcagattatattctagagattcctgactactaacgaaattaatatgatttggccaaatgtatccatcataatctgggttataaacgggtgtaaacaagaatatatgtttatattttttaactagtgtagaaaacagagatagtaaatagatagtttttccagatccagatcctcccgttaaaaccattctaaacggcatttttaataaattttctcttgaaaattgtttttcttggaaacaattcataattatatttacagttactaaattaatttgataataaatcaaaatatggaaaactaaggtcgttagtagggaggagaacaaagaaggcacatcgtgacataaataacatttattatcatgatgacaccagaaaacgacgaagagcagacatctgtgttctccgctactgtttacggagacaaaattcaaggaaagaataaacgcaaacgcgtgattggtctatgtattagaatatctatggttatttcactactatctatgattaccatgtccgcgtttctcatagtgcgcctaaatcaatgcatgtctgctaacgaggctgctattactgacgccgctgttgccgttgctgctgcatcatctactcatagaaaggttgcgtctagcactacacaatatgatcacaaagaaagctgtaatggtttatattaccagggttcttgttatatattacattcagactaccagttattctcggatgctaaagcaaattgcactgcggaatcatcaacactacccaataaatccgatgtcttgattacctggctcattgattatgttgaggatacatggggatctgatggtaatccaattacaaaaactacatccgattatcaagattctgatgtatcacaagaagttagaaagtatttttgtgttaaaacaatgaactaatatttatttttgtacattaataaatgaaatcgcttaatagacaaactgtaagtaggtttaagaagttgtcggtgccggccgctataatgatgatactctcaaccattattagtggcataggaacatttctgcattacaaagaagaactgatgcctagtgcttgcgccaatggatggatacaatacgataaacattgttatttagatactaacattaaaatgtctacagataatgcggtttatcagtgtcgtaaattacgagccagattgcctagaccggatactagacatctgagagtattgtttagtattttttataaagattattgggtaagtttaaaaaagaccaatgataaatggttagatattaataatgataaagatatagatattagtaaattaacaaattttaaacaactaaacagtacgacggatgctgaagcgtgttatatatacaagtctggaaaactggttaaaacagtatgtaaaagtactcaatctgtactatgtgttaaaaaattctacaagtgacaacaaaaaatgaattaataataagtcgttaacgtacgccgccatggacgccgcgtttgttattactccaatgggtgtgttgactataacagatacattgtatgatgatctcgatatctcaatcatggactttataggaccatacattataggtaacataaaaactgtccaaatagatgtacgggatataaaatattccgacatgcaaaaatgctactttagctataagggtaaaatagttcctcaggattctaatgatttggctagattcaacatttatagcatttgtgccgcatacagatcaaaaaataccatcatcatagcatgcgactatgatatcatgttagatatagaagataaacatcagccattttatctattcccatctattgatgtttttaacgctacaatcatagaagcgtataacctgtatacagctggagattatcatctaatcatcaatccttcagataatctgaaaatgaaattgttgtttaattcttcattctgcatatcagacggcaatggatggatcataattgatgggaaatgcaatagtaattttttatcataaaagttgtaaagtaaataataaaacaataaatattgaactagtagtacgtatattgagcaatcagaaatgatgctggtacctcttatcacggtgaccgtagttgcgggaacaatattagtatgttatatattatatatttgtaggaaaaagatacgtactgtctataatgacaataaaattatcatgacaaaattaaaaaagataaagagttctaattccagcaaatctagtaaatcaactgatagcgaatcagactgggaggatcactgtagtgctatggaacaaaacaatgacgtagataatatttctaggaatgagatattggacgatgatagcttcgctggtagtttaatatgggataacgaatccaatgtcatggcgcctagcacagaacacatttacgatagtgttgctggaagcacgctgctaataaataatgatcgtaatgaacagactatttatcagaacactacagtagtaattaatgagacggagactgttgaagtacttaatgaagataccaaacagaatcctaactattcatccaatcctttcgtaaattataataaaaccagtatttgtagcaagtcaaatccgttcattacagaactcaacaataaatttagtgagaataatccgtttagacgagcacatagcgatgattatcttaataagcaagaacaagatcatgaacacgatgatatagaatcatcggtcgtatcattggtgtgattagtttcctttttataaaattgaagtaatatttagtattattgctgccgtcacgttgtacaaatggagatattccctgtattcggcatttctaaaattagcaattttattgctaataatgactgtagatattatatagatacagaacatcaaaaaattatatctgatgagatcaatagacagatggatgaaacggtacttcttaccaacatcttaagcgtagaagttgtaaatgacaatgagatgtaccatcttattccccatagactatcgactattatactctgtattagttctgtcggaggatgtgttatctctatagataatgacatcaatgacaaaaatattctaacatttcccattgatcatgctgtaatcatatccccactgagtaaatgtgtcgtagttagcaagggtcctacaaccatattggttgttaaagcggatatacccagcaaacgattggtaacatcgtttacaaacgacatactgtatgtaaacaatctgtcactgattaattatttgccgttgtctgtattcattattagacgagtcaccgactatttggatagacacatatgcgatcagatatttgcgaataataagtggtattccattataaccatcgacgataagcaatatcctattccatcaaactgtataggtatgtcctctgccaagtacataaattctagcatcgagcaagatactttaatacatgtttgtaacctcgagcatccattcgacttagtatacaaaaaaatgcagtcgtacaattctgtacctatcaaggaacaaatattgtacggtagaattgataatataaatatgagcattagtatttctgtggattaatagatttctagtatggggatcattaatcatctctaatctctaaatacctcataaaacgaaaaaaaagctattatcaaatactgtacggaatggattcattctcttctctttttatgaaactctgttgtatatctactgataaaactggaagcaaaaaatctgataaaaagaataagaataagatcaaggattatatggaacacgattattataaaataacaatagttcctggttcctcttccacgtctactagctcgtggtattatacacatgcctagtaatagtctctttgcgttgacggaaagcagactagaaataacaggctaaaatgttcagacaccataatagttcccaacccagataataacagagtaccatcaacacattcctttaaactcaatcccaaacccaaaaccgttaaaatgtatccggccaattgatagtagataatgaggtgtacagcgcatgataatttacacagtaaccaaaatgaaaatactttagtaattataagaaatatagatggtaacgtcatcatcaacaatccaataatatgccggagagtaaacattgacggataaaacaaaaatgctccgcataactctatcatggcaataacacaaccaaatacttgtaagattcctaaattagtagaaaatacaacggatatcgatgtataagtgatctcgagaaataataagaataaagtaatgcccgtaaagataaacatcaacattgtttggtaatcattaaaccaattagtatgaagttgaactaatttcacagtagattttattccagtgttatcctcgcatgtatacgtacctggtaagatatctttatattctataatcaatgagacatcactatccgataacgaatgaagtctagcactagtatgccatttacttaatatggtcgtcttggaagttttattataagttaaaatatcatggttgtccaatttccatctaatatactttgtcggattatctatagtacacggaataatgatggtattattacatgctgtatactctatagtctttgtagatgttataatcataaaagtacagaggtatatcaacgatattctaactcttgacattttttatttatttaaaatgatacctttgttatttattttattctattttgctaacggtatcgaatggcataagtttgaaacgagtgaagaaataatttctacttacttattagacgacgtattatacacgggtgttaatggggcggtatacacattttcaaataataaactaaacaaaactggtttagctaatactaattatatcacaacatctataaaagtagaggatgcggataaggatacattagtatgcggaaccaataacggaaatcccaaatgttggaaaatagacggttcagacgacccaaaacatagaggtagaggatacgctccttatcaaaatagcaaagtaacgataatcagtcacaacggatgtgtactatctgacataaacatatcaaaagaaggaattaaacgatggagaagatttgacggaccatgtggttatgatttatacacggcggataacgtaattccaaaagatggtttacgaggagcattcgtcgataaagatggtacttatgacaaagtttacattcttttcactgatactatcggctcaaagagaattgtcaaaattccgtatatagcacaaatgtgcctaaacgacgaaggtggtccatcatcattgtctagtcatagatggtcgacgtttctcaaagtcgaattagaatgtgatatcgacggaagaagttatagacaaattattcattctagaactataaaaacagataatgatacgatactatatgtattcttcgatagtccgcattatgtacctattctatgaataccattaaacaatctttttctacgtcaaaattggaaggatatacaaagcaattgccgtctccagctcctggtatatgtctaccagctggaaaagttgttccacataccacgtttgaagtcatagaaaaatataatgtactagatgatattataaagcctttatctaaccaacctatcttcgaaggaccgtctggtgttaaatggttcgatataaaggagaaggaaaatgaacatcgggaatatagaatatacttcataaaagaaaattctatatattcgttcgatacaaaatctaaacaaactcgtagctcgcaagtcgatgcgcgactattttcagtaatggtaacttcgaaaccgttatttatagcagatatagggataggagtaggaatgccacaaatgaaaaaaatacttaaaatgtaatcttaatcgagtacaccacacgacaatgaacaaacataagacagattatgctggttatgcttgctgcgtaatatgcggtctaattgttggaattatttttacagcgacactattaaaagttgtagaacgtaaattagttcatacaccatcaatagataaaacgataaaagatgcatatattagagaagattgtcctactgactggataagctataataataaatgtatccatttatctactgatcgaaaaacctgggaggaaggacgtaatgcatgcaaagctctaaatccaaattcggatctaattaagatagagactccaaacgagttaagttttttaagaagcattagacgcggatattgggtaggagaatccgaaatattaaaccagacaaccccatataattttatagctaagaatgccacgaagaatggaactaaaaaacggaaatatatttgtagcacaacgaatactcccaaactgcattcgtgttacactatataacaattacactacatttttatcataccactacttcggttagatgttttagaaaaaaataaatatcgccgtaccgttcttgtttttataaaaataacaattaacaattatcaaattttttctttaatattttacgtggttgaccattcttggtggtaaaataatctcttagtgttggaatggaatgctgtttaatgtttccacactcatcgtatattttgacgtatgtagtcacatcgtttacgcaatagtcagactgtagttctatcatgcttcctacattagaaggaggaacagttttaaagtctcttggttttaatctattaccgttagttttcatgaaatcctttgttttatccacttcacattttaaataaatgtccactatacattcttctgttaattttactagatcgtcatgggtcatagaatttataggttccgtagtccatggatccaaactagcaaacttcgcgtatacggtatcgcgattagtgtatacaccaactgtatgaaaattaagaaaacagtttaatagatcaacagaaatatttaatcctccgtttgatacagatgcaccatatttatggattttggattcacacgttgtttgtctgaggggttcgtctagcgttgcttctacataaacttctattcccatatattctttattgtcagaatcgcataccgatttatcatcatacactgtttgaaaactaaatggtatacacatcaaaataacaaatactaacgagtacattctgcaatattgttatcgtaattggaaaaatagtgttcgagtgagttggattatgtgagtattggattgtatattttattttatattttgtaataagaataaaatgctaatgtcaagtttattccaatagatgtcttattaaaaacatatataataaataacaatggctgaatggcataaaattatcgaggatatctcaaaaaataataagttcgaggatgccgccatcgttgattacaagactacaaagaatgttctagctgctattcctaacagaacatttgccaagattaatccgggtgaaattattcctctcatcactaatcgtaatattctaaaacctcttattggtcagaaatattgtattgtatatactaactctctaatggatgagaacacgtatgctatggagttgcttactgggtacgcccctgtatctccgatcgttatagcgagaactcataccgcacttatatttttgatgggtaagccaacaacatccagacgtgacgtgtatagaacgtgtagagatcacgctacccgtgtacgcgcaactggtaattaaaataaaaagtaatattcatatgtagtgtcaattttaaatgatgatgatgaaatggataatatccatattgacgatgtcaataatgccggtattggcatacagctcatcgatttttagatttcattcagaggatgtggaattatgttatgggcatttgtattttgataggatctataatgtagtaaatataaaatataatccgcatattccatatagatataattttattaatcgcacgttaaccgtagatgaactagacgataatgtcttttttacacatggttattttttaaaacacaaatatggttcacttaatcctagtttgattgtctcattatcaggaaacttaaaatataatgatatacaatgctcagtaaatgtatcgtgtctcattaaaaatttggcaacgagtacatctactatattaacatctaaacataagacttattctctacatcggtccacgtgtattactataataggatacgattctattatatggtataaagatataaatgacaagtataatggcatctatgattttactgcaatatgtatgctaatagcgtctacattgatagtgaccatatacgtgtttaaaaaaataaaaatgaactcttaattatgctatgctattagaaatggataaaatcaaaattacggttgattcaaaaattggtaatgttgttaccatatcgtataacttggaaaagataactattgatgtcacacctaaaaagaaaaaagaaaaggatgtattattagcgcaatcagttgctgtcgaagaggcaaaagatgtcaaggtagaagaaaaaaatattatcgatattgaagatgacgatgatatggatgtagaaagcgcataatacgatctataaaaataagtatataaatactttttatttactgtactcttactgtgtagtggtgataccctactcgattatttttttaaaaaaatacttattctgattcttctagccatttccgtgttcgttcgaatgccacatcgacgttaaagataggggagtagttgaaatctagttctgcattgttggtacgcacctcaaatgtagtgttggatatcttcaacgtatagttgttgagtagtgatggttttctaaatagaattctcttcatatcattcttgcacgcgtacatttttagcatccatcttggaattctagatccttgttctattcccaatggtttcatcaatagaagattaaacatatcgtacgaacacgatggagagtaatcgtagcaaaagtaagcatttcctttaatctcagatcccggatactggatatattttgcagccaacacgtgcatccatgcaacatttcctacatatacccggctatgcaccgcgtcatcatcgactgtacgatacataatgttaccgtgttgcttacattgctcgtaaaagactttcgtcaatttgtctccttctccgtaaattccagtgggtcttaggcaacaagtatacaattttgctccattcatgattacggaattattggctttcataaccagttgctcggccatacgtttactttttgcgtatacatgtcctggtgatatatcataaagggtatgctcatggccgatgaatggatcaccgtgtttatttggtcctattgcttccatgctactagtatagatcaaatacttgattcctaggtccacacaagctgccaatatagtctgtgttccataatagtttactttcatgatttcattatcggtgtattttccaaatacatccactagagcagccgtatgaataatcagatttaccccatctagcgcttctctcaccttatcaaagtcgtttatatcacattgtatatagtttataaccttaactttcgaggttattggttgtggatcttctacaatatctatgactctgatttcttgaacatcatctgcactaattaacagttttactatatacctgcctagaaatccggcaccaccagtaaccgcgtacacggccattgctgccactcataatatcagactacttattctattttactaaataatggctgtttgtataatagaccacgataatatcagaggagttatttactttgaaccagtccatggaaaagataaagttttaggatcagttattggattaaaatccggaacgtatagtttgataattcatcgttacggagatattagtcaaggatgtgattccataggcagtccagaaatatttatcggtaacatctttgtaaacagatatggtgtagcatatgtttatttagatacagatgtaaatatatctacaattattggaaaggcgttatctatttcaaaaaatgatcagagattagcgtgtggagttattggtatttcttacataaatgaaaagataatacattttcttacaattaacgagaatggcgtttgatatatcagttaatgcgtctaaaacaataaatgcattagtttacttttctactcagcaaaataaattagtcatacgtaatgaagttaatgatacacactacactgtcgaatttgatagggacaaagtagttgacacgtttatttcatataatagacataatgacaccatagagataagaggggtgcttccagaggaaactaatattggttgcgcggttaatacgccggttagtatgacttacttgtataataagtatagttttaaactgattttagcagaatatataagacacagaaatactatatccggcaatatttattcggcattgatgacactagatgatttggctattaaacagtatggagacattgatctattatttaatgagaaacttaaagtagactccgattcgggactatttgactttgtcaactttgtaaaggatatgatatgttgtgattctagaatagtagtagctctatctagtctagtatctaaacattgggaattgacaaataaaaagtataggtgtatggcattagccgaacatatatctgatagtattccaatatctgagctatctagactacgatacaatctatgtaagtatctacgcggacacactgagagcatagaggataaatttgattattttgaagacgatgattcgtctacatgttctgccgtaaccgacagggaaacggatgtataattttttttatagcgtgaaggatatgataaaaaatataattgttgtatttatcccattccaatcaccttatatgattctgtaacacaatgaaggagtctcatagatgtatagaggtcagatactggtttgataaactgtttattccacatgagtatgtttgactttatggttagacccgcatactttaacaaatcactgaaaattggagttaggtattgacctctcagaatcagttgccgttctggaacattaaatgtattttttatgatatactccaacgcatttatgtgggcatacaacaagtcattactaatggagtattccaagagttttagttgtctagtatttaacaagagaagagatttcaacagactgtttatgaactcgaatgccgcctcattgtcgcttatattgatgatgtcgaattctcccaatatcatcaccgatgagtagctcatcttgttatcgggatccaagttttctaaagatgtcattaaaccctcgatcatgaatggatttatcatcatcgtttttatgttggacatgagcttagtccgtttgtccacatctatagacgacgatttctgaattattttatatatccctctctttaactccaggaacttgtcaggatggtctactttaatatgttctcgtctaagagatgaaaatctttggatggttgcacgcgacttttctctaaaggatgacgttgcccaagatcctctcttaaatgaatccatcttatccttggacaagatggacagtctattttccttagatggtttaatatttttgttacccatgatctataaaggtagacctaatcgtctcggatgacctatatatttattttcagttttattatacgcataaattgtaaaaaatatgttaggtttacaaaaatgtctcgtggggcattaatcgtttttgaaggattggacaaatctggaaaaacaacacaatgtatgaacatcatggaatctataccggcaaacacgataaaatatcttaactttcctcagagatccactgtcactggaaagatgatagatgactatctaactcgtaaaaaaacctataatgatcatatagttaatctattattttgtgcaaatagatgggagtttgcatcttttatacaagaacaactagaacagggaattactttaatagttgatagatacgcgttctctggagtagcgtatgccgccgctaaaggcgcgtcaatgactctcagtaagagttatgaatctggattgcctaaacccgacttagttatattcttggaatctggtagcaaagaaattaatagaaacgtcggcgaggaaatttatgaagatgttacattccaacaaaaggtattacaagaatataaaaaaatgattgaagaaggagatattcattggcaaattatttcttctgaattcgaggaagatgtaaagaaggagttgattaagaatatagttatagaggctatacacacggttactggaccagtggggcaactgtggatgtaatagtgaaattacattttttataaatagatgttagtacagtgttataaatggatgaagcatattactctggcaacttggaatcagtactcggatacgtgtccgatatgcataccgaactcgcatcaatatctcaattagttattgccaagatagaaactatagataatgatatattaaacaaggacattgtaaattttatcatgtgtagatcaaacttggataatccatttatctctttcctagatactgtatatactattatagatcaagagaactatcagaccgaattgattaattcattagacgacaatgaaattatcgattgtatagttaataagtttatgagcttttataaggataacctagaaaatatagtagatgctatcattactctaaaatatataatgaataatccagattttaaaactacgtatgccgaagtactcggttccagaatagccgatatagatattaaacaagtgatacgtgagaatatactacaattgtctaatgatatccgcgaacgatatttgtgaaaaatattaaaaaaaaatactttttttattaaatgacgtcgcttcgcgaatttagaaaattatgctgtgatatatatcacgcatcaggatataaagaaaaatctaaattaattagagactttataacagatagggatgataaatatttgatcattaagctattgcttcccggattagacgatagaatttataacatgaacgataaacaaattataaaattatatagtataatatttaaacaatctcaggaagatatgctacaagatttaggatacggatatataggagacactattaggactttcttcaaagagaacacagaaatccgtccacgagataaaagcattttaactttagaagacgtggatagtttcttaactacgttatcatccgtaactaaagaatcgcatcaaataaaattattgactgatatcgcatccgtttgtacatgtaatgatttaaaatgtgtagtcatgcttattgataaagatctaaaaattaaagcgggtcctcggtacgtacttaacgctattagtcctaatgcctatgatgtgtttagaaaatctaataacttgaaagagataatagaaaatgcatctaaacaaaatctagactctatatctatttctgttatgactccaattaatcccatgttagcggaatcgtgtgattctgtcaataaggcgtttaaaaaatttccatcaggaatgtttgcggaagtcaaatacgatggtgaaagagtacaagttcataaaaataataacgagtttgccttctttagtagaaacatgaaaccagtactctctcataaagtggattatctcaaagaatacataccgaaagcatttaaaaaagctacgtctatcgtattggattctgaaattgttcttgtagacgaacataatgtaccgctcccgtttggaagtttaggaatacacaaaaagaaagaatataaaaactctaacatgtgtttgttcgtgtttgactgtttgtactttgatggattcgatatgacggacattccattgtacgaacgaagatcttttctcaaagatgttatggttgaaatacccaatagaatagtattctcagagttgacgaatattagtaacgagtctcagttaactgacgtattggatgatgcactaacgagaaaattagaaggattggtcttaaaagatattaatggagtatacgaaccgggaaagagaagatggttaaaaataaagcgagactatttgaacgagggttccatggcagattctgccgatttagtagtactaggtgcttactatggtaaaggagcaaagggtggtatcatggcagtctttctaatgggttgttacgacgatgaatccggtaaatggaagacggttaccaagtgttcaggacacgatgataatacgttaagggttttgcaagaccaattaacgatggttaaaattaacaaggatcccaaaaaaattccagagtggttggtagttaataaaatctatattcccgattttgtagtagaggatccgaaacaatctcagatatgggaaatttcaggagcagagtttacatcttccaagtcccataccgcaaatggaatatccattagatttcctagatttactaggattagagaagataaaacgtggaaagaatctactcatctaaacgatttagtaaacttgactaaatcttaatagttacatacaaactgaaaattaaaataacactatttagttggtggtcgccatggatggtgttattgtatactgtctaaacgcgttagtaaaacatggcgaggaaataaatcatataaaaaatgatttcatgattaaaccatgttgtgaaagagtttgtgaaaaagtcaagaacgttcacattggcggacaatctaaaaacaatacagtgattgcagatttgccatatatggataatgcggtatccgatgtatgcaattcactgtataaaaagaatgtatcaagaatatccagatttgctaatttgataaagatagatgacgatgacaagactcctactggtgtatataattattttaaacctaaagatgttattcctgttatcatatctataggaaaggataaagatgtctgtgaactattaatctcatcagacatatcgtgtgcatgcgtggagttaaattcatatcacgtagccattcttcccatggatgtttccttttttaccaaaggaaatgcatcattgattattctcctgtttgatttctctatcgatgcagcacctctcttaagaagtgtaaccgataataatgttattatatctagacaccagcgtctacatgacgagcttccgagttccaattggttcaagttttacataagtataaagtccgactattgttctatattatatatggttgttgatggatctgtgatgcatgcgatagctgataatagaactcacgcaattattagcaaaaatatattagacaatactacgattaacgatgagtgtagatgctgttattttgaaccacagattaggattcttgatagagatgagatgctcaatggatcatcgtgtgatatgaacagacattgtattatgatgaatttacctgatgtaggcaaatttggatctagtatgttggggaaatatgaacctgacatgattaagattgctctttcggtggctggtaatttaataagaaatcgagactacattcccgggagacgaggatatagctactacgtttacggtatagcctctagataatttttttaagcacgaaataaaaaacataattttaaaccaatctatttcatactattttgtgtgatcaccatggacataaagatagatattagtatttctggtgataaatttacggtgactactaggagggaaaatgaagaaagaaaaaaatatctacctctccaaaaagaaaaaactactgatgttatcaaacctgattatcttgagtacgatgacttgttagatagagatgagatgtttactattctagaggaatattttatgtacagaggtctattaggcctcagaataaaatatggacgactctttaacgaaattaaaaaattcgacaatgatgcggaagaacaattcggtactatagaagaactcaagcagaaacttagattaaattctgaagagggagcagataactttatagattatataaaggtacaaaaacaggatatcgtcaaacttactgtatacgattgcatatctatgataggattgtgtgcatgcgtggtagatgtttggagaaatgagaaactgttttctagatggaaatattgtttacgagctattaaactgtttattaatgatcacatgcttgataagataaaatctatactgcagaatagactagtatatgtggaaatgtcatagaaagttaaaagttaatgagagcaaaaatatataaggttgtattccatatttgttattttttctgtaatagttagaaaaatacattcgatggtctatctaccagattattatgtgttataaggtactttttctcataataaactagagtatgagtaagatagtgtttttcaaaacatataaatctaaaattgatggatgagatatacagctattaatttcgaaaatatattttaatctgataactttaaacatggatttttgatggtggtttaacgttttaaaaaaagattttgttattgtagtatatgataatattaaaagatggatataaagaatttgctgactgcatgtactattttttacattactacattggctacggcagatatacctactccgccaccaacgggtcatgtgacaagggagaatatcttgataagaggcataatcaatgttgtaatcggtgtccacctggagaatttgccaaggttagatgtaatggtaacgataacacaaaatgtgaacgctgcccacctcatacatataccacaatcccaattattctaatggatgtcatcaatgtagaaaatgcccaaccggatcatttgataaggtaaagtgtaccggaacacagaacagtaaatgttcgtgtcttcctggttggtattgtgctactgattcttcacagactgaagattgttgaaattgtgtaccaaaaaggagatgtccatgcggatactttggtggaatagatgaacaaggaaatcctatttgtaaatcgtgttgtgttggtgaatattgcgactacctacgtaattatagacttgatccatttcctccatgcaaactatctaaatgtaattaattatgattttgatgataatgttaccatacattatatcgctacttggttagtgtattattcagtatgaagacctattaataattacttatcttttgacgatcttgttataattataatataaaaatacttatggcatagtaactcataattgctgacgcgataaattcgtaataatctgttttgttcaaatttttataaggaatctacaggcataaaaataaaaatataatttataatatactcttacagcgcgccatcatgaataacagcagtgaattgattgctgttattaatggatttagaaatagtggacgattttgtgatattagtatagttattaatgatgaaaggataaacgctcataaactcatcctatctggagcctccgaatatttttccattctgttttccaataattttatcgattctaatgaatacgaagttaatctaagtcatttagattatcaaagcgttaacgatttgatcgattacatttatgggatacctttgagcctaactaacgataacgtgaaatatattctttcaaccgctgattttttacaaattggatctgctattacggagtgtgaaaattacatacttaaaaatctttgttctaaaaactgtatcgatttctacatatacgctgataaatataataacaagaaaatagaatcagcgtcgtttaacacaatattacaaaatattttgagactcatcaacgatgaaaactttaaatacttaacagaggaatcaatgataaaaattttaagcgatgatatgttaaatataaaaaatgaggattttgcaccactaattctcattaaatggttagagagtactcaacaatcatgcaccgtcgagttacttagatgcctcagaatatcattgctttccccacaagttataaaatcactttatagtcatcaactggttagttcaatctacgaatgtataacattcttaaacaatatagcattcttggatgaatcatttcctagataccatagcatcgagttgatatctatcggtataagtaattcgcatgataagatttccataaactgctacaatcataaaaaaaatacatgggaaatgatatcttcacgtagatataggtgtagtttcgcagtggccgtcctggataatattatctatatgatgggtggatatgatcagtccccgtatagaagttcaaaggttatagcgtacaatacatgtacaaattcttggatatatgatataccagagctaaaatatcctcgttctaattgtgggggactggctgatgacgaatacatttattgtataggcggcatacgcgatcaggattcatcgttgacatctagtattgataaatggaagccatcaaaaccatattggcagaagtatgctaaaatgcgcgaaccaaaatgtgatatgggggttgcgatgttaaacggattaatatatgtcatgggtggaatcgttaaaggtgacacgtgtaccgacgcactagagagtttatcagaagatggatggatgaagcatcaacgtcttccaataaaaatgtccaatatgtcgacgattgttcatgatggcaagatttatatatctggaggttacaacaatagtagtgtagttaatgtaatatcgaatctagtccttagctataatccgatatatgatgaatggaccaaattatcatcattaaacattcctagaattaatcccgctctatggtcagcgcataataaattatatgtaggaggaggaatatctgatgatgttcgaactaatacatctgaaacatacgataaagaaaaagattgttggacattggataatggtcacgtgttaccacgcaattatataatgtataaatgcgaaccgattaaacataaatatccattggaaaaaacacagtacacgaatgattttctaaagtatttggaaagttttataggtagttgatagaacaaaatacataattttgtaaaaataaatcactttttatactaatatgacacgattaccaatacttttgttactaatatcattagtatacgctacaccttttcctcagacatctaaaaaaataggtgatgatgcaactctatcatgtaatcgaaataatacaaatgactacgttgttatgagtgcttggtataaggagcccaattccattattcttttagctgctaaaagcgacgtcttgtattttgataattataccaaggataaaatatcttacgactctccatacgatgatctagttacaactatcacaattaaatcattgactgctagagatgccggtacttatgtatgtgcattctttatgacatcaactacaaatgacactgataaagtagattatgaagaatactccacagagttgattgtaaatacagatagtgaatcgactatagacataatactatctggatctacacattcaccggaaactagttctaagaaacctgattatatagataattctaattgctcgtcggtattcgaaatcgcgactccggaaccaattactgataatgtagaagatcatacagacaccgtcacatacactagtgatagcattaatacagtaagtgcatcatctggagaatccacaacagacgagactccggaaccaattactgataaagaagatcatacagttacagacactgtctcatacactacagtaagtacatcatctggaattgtcactactaaatcaaccaccgatgatgcggatctttatgatacgtacaatgataatgatacagtaccaccaactactgtaggcggtagtacaacctctattagcaattataaaaccaaggactttgtagaaatatttggtattaccgcattaattatattgtcggccgtggcaattttctgtattacatattatatatataataaacgttcacgtaaatacaaaacagagaacaaagtctagatttttgacttacataaatgtctgggatagtaaaatctatcatattgagcggaccatctggtttaggaaagacagccatagccaaaagactatgggaatatatttggatttgtggtgtcccataccactagatttcctcgtcctatggaacgagaaggtgttgattaccattacgttaacagagaggccatctggaagggaatagccgccggaaactttctagaacatactgagtttttaggaaatatttacggaacttctaaaacagctgtgaatacagcggctattaataatcgtatttgtgtgatggatctaaacatcgacggtgttagaagtcttaaaaatacgtacctaatgccttactcggtgtatataagacctacctctcttaaaatggttgagaccaagcttcgttgtagaaacactgaagctaacgatgagattcatcgtcgcgtgatattggcaaaaacggatatggatgaggccaacgaagcaggtctattcgacactattatcattgaagatgatgtgaatttagcatatagtaagttaattcagatactacaggaccgtattagaatgtattttaacactaattagagacttaagacttaaaacttgataattaataatataactcgtttttatatgtggctatttcaacgtctaatgtattagttaaatattaaaacttaccacgtaaaacttaaaatttaaaatgatatttcattgacagatagatcacacattatgaactttcaaggacttgtgttaactgacaattgcaaaaatcaatgggtcgttggaccattaataggaaaaggtggattcggtagtatttatactactaatgacaataattatgtagtaaaaatagagcccaaagctaacggatcattatttaccgaacaggcattttatactagagtacttaaaccatccgttatcgaagaatggaaaaaatctcacaatataaagcacgtaggtcttatcacgtgcaaggcatttggtctatacaaatccattaatgtggaatatcgattcttggtaattaatagattaggtgcagatctagatgcggtgatcagagccaataataatagattaccaaaaaggtcggtgatgttgatcggaatcgaaatcttaaataccatacaatttatgcacgagcaaggatattctcacggagatattaaagcgagtaatatagtcttggatcaaatagataagaataaattatatctagtggattacggattggtttctaaattcatgtctaatggagaacatgttccatttataagaaatccaaataaaatggataacggtactctagaatttacacctatagattcgcataaaggatacgttgtatctagacgtggagatctagaaacacttggatattgtatgattagatggttgggaggtatcttgccatggactaagatatctgaaacaaagaattgtgcattagtaagtgccacaaaacagaaatatgttaacaatactgcgactttgttaatgaccagtttgcaatatgcacctagagaattgctgcaatatattaccatggtaaactctttgacatattttgaggaacccaattatgacgagtttcggcacatattaatgcagggtgtatattattaagtgtggtgtttggtcgatgtaaaatttttgtcgataaaaattaaaaaataacttaatttattattgatctcgtgtgtacaaccgaaatcatggcgatgttttacgcacacgctctcggtgggtacgacgagaatcttcatgcctttcctggaatatcatcgactgttgccaatgatgtcaggaaatattctgttgtgtcagtttataataacaagtatgacattgtaaaagacaaatatatgtggtgttacagtcaggtgaacaagagatatattggagcactgctgcctatgtttgagtgcaatgaatatctacaaattggagatccgatccatgatcaagaaggaaatcaaatctctatcatcacatatcgccacaaaaactactatgctctaagcggaatcgggtacgagagtctagacttgtgtttggaaggagtagggattcatcatcacgtacttgaaacaggaaacgctgtatatggaaaagttcaacatgattattctactatcaaagagaaggccaaagaaatgaatgcacttagtccaggacctatcattgattaccacgtctggataggagattgtatctgtcaagttactgctgtggacgtacatggaaaggaaattatgagaatgagattcaaaaagggtgcggtgcttccgatcccaaatctggtaaaagttaaacttggggagaatgatacagaaaatctttcttctactatatcggcggcaccatcgaggtaaccacctctctggaagacagcgtgaataatgtactcatgaaacgtttggaaactatacgccatatgtggtctgtcgtatatgatcattttgatattgtgaatggtaaagaatgctgttatgtgcatacgcatttgtctaatcaaaatcttataccgagtactgtaaaaacaaatttgtacatgaagactatgggatcatgcattcaaatggattccatggaagctctagagtatcttagcgaactgaaggaatcaggtggatggagtcccagaccagaaatgcaggaatttgaatatccagatggagtggaagacactgaatcaattgagagattggtagaggagttcttcaatagatcagaacttcaggctggtgaatcagtcaaatttggtaattctattaatgttaaacatacatctgtttcagctaagcaactaagaacacgtatacggcagcagcttcctttatactctcatcttttaccaacacaaagggtggatatttgttcattggagttgataataatacacacaaagtaattggattcacggtgggtcatgactacctcagactggtagagaatgatatagaaaagcatatcaaaagacttcgtgttgtgcatttctgtgagaagaaagaggacatcaagtacacgtgtcgattcatcaaggtatataaacctggggatgaggctacctcgacatacgtgtgcgctatcaaagtggaaagatgctgttgtgctgtgtttgcagattggccagaatcatggtatatggatactaatggtatcaagaagtattctccagatgaatgggtgtcacatataaaattttaattaatgtaatagagaacaaataataaggttgtaatatcatatagacaataactaacaattaattagtaactgttatctcttttttaactaaccaactaactatatacctattaatacatcgtaattatagttcttaacatctattaatcattaattcgcttctttaattttttataaactaacattgttaattgaaaagggataacatgttacagaatataaattatatatggatttttttaaaaaggaaatacttgactggagtatatatttatctcttcattatatagcacgcgtgttttccaatttttccacatcccatataatacaggattataatctcgttcgaacatacgagaaagtggataaaacaatagttgattttttatctaggttgccaaatttattccatattttagaatatggggaaaatattctacatatttattctatggatgatgctaatacgaatattataattttttttctagatagagtattaaatattaataagaacgggtcatttatacacaatctcaggttatcatcatccattaatataaaagaatatgtatatcaattagttaataatgatcatccagataataggataagactaatgcttgaaaatggacgtagaacaagacattttttgtcctatatatcagatacagttaatatctatatatgtattttaataaatcatggattttatatagatgccgaagacagttacggttgtacattattacatagatgtatatatcactataagaaatcagaatcagaatcatacaatgaattaattaagatattgttaaataatggatcagatgtagataaaaaagatacgtacggaaacacaccttttatcctattatgtaaacacgatatcaacaacgtggaattgtttgagatatgtttagagaatgctaatatagactctgtagactttaatagatatacacctcttcattatgtctcatgtcgtaataaatatgattttgtaaagttattaatttctaaaggagcaaatgttaatgcgcgtaatagattcggaactactccattttattgtggaattatacacggtatctcgcttataaaactatatttggaatcagacacagagttagaaatagataatgaacatatagttcgtcatttaataatttttgatgctgttgaatctttagattatctattatccagaggagttattgatattaactatcgtactatatacaacgaaacatctatttacgacgctgtcagttataatgcgtataatacgttggtctatctattaaacagaaatggtgattttgagacgattactactagtggatgtacatgtatttcggaagcagtcgcaaacaacaacaaaataataatggaagtactattgtctaaacgaccatctttgaaaattatgatacagtctatgatagcaattactaaacataaacagcataatgcagatttattgaaaatgtgtataaaatatactgcgtgtatgaccgattatgatactcttatagatgtacagtcgctacagcaatataaatggtatattttaaaatgtttcgatgaaatagatatcatgaagagatgttatataaaaaataaaactgtattccaattagttttttgtatcaaagacattaatactttaatgagatacggtaaacatccttctttcgtgaaatgcactagtctcgacgtatacggaagtcgtgtacgtaatatcatagcatctattagatatcgtcagagattaattagtctattatccaagaagctggatcctggagataaatggtcgtgttttcctaacgaaataaaatataaaatattggaaaactttaacgataacgaactatccacatatctaaaaatcttataaacactattaaaatataaaatctaagtaggataaaatcacactacatcattgtttccttttagtgctcgacagtgtatactatttttaacactcataaataaaaatgaaaacgatttccgttgttacgttgttatgcgtactacctgctgttgtttattcaacatgtactgtacccactatgaataacgctaaattaacgtctaccgaaacatcgtttaatgataaacagaaagttacgtttacatgtgatcagggatatcattcttcggatccaaatgctgtctgcgaaacagataaatggaaatacgaaaatccatgcaaaaaaatgtgcacagtttctgattacatctctgaattatataataaaccgctatacgaagtgaattccaccatgacactaagttgcaacggcgaaacaaaatattttcgttgcgaagaaaaaaatggaaatacttcttggaatgatactgttacgtgtcctaatgcggaatgtcaacctcttcaattagaacacggatcgtgtcaaccagttaaagaaaaatactcatttggggaatatatgactatcaactgtgatgttggatatgaggttattggtgcttcgtacataagttgtacagctaattcttggaatgttattccatcatgtcaacaaaaatgtgatatgccgtctctatctaatggattaatttccggatctacattttctatcggtggcgttatacatcttagttgtaaaagtggttttacactaacggggtctccatcatccacatgtatcgacggtaaatggaatcccgtactcccaatatgtgtacgaactaacgaagaatttgatccagtggatgatggtcccgacgatgagacagatttgagcaaactctcgaaagacgttgtacaatatgaacaagaaatagaatcgttagaagcaacttatcatataatcatagtggcgttaacaattatgggcgtcatatttttaatctccgttatagtattagtttgttcctgtgacaaaaataatgaccaatataagttccataaattgctaccgtaaatataaatccgttaaaataatgaataattaataacgaacaagtatcaaaagattaaagaattatagctagaatcaattgagatgtcttcttcagtggatgttgatatctacgatgccgttagagcatttttactcaggcactattataacaagagatttattgtgtatggaagaagtaacgccatattacataatatatacaggctatttacaagatgcgccgttataccgttcgatgatatagtacgtactatgccaaatgaatcacgtgttaaacaatgggtgatggatacacttaatggtataatgatgaatgaacgcgatgtttctgtaagcgttggcaccggaatactattcatggaaatgtttttcgattacaataaaaatagtatcaacaatcaactaatgtatgatataattaatagcgtatctataattctagctaatgagagatatagaagcgcttttaacgacgatggtatatacatccgtagaaatatgattaacaagttgtacggatacgcatctctaactactattggcacgatcgctggaggtgtttgttattatctgttgatgcatctagttagtttgtataaataattatttcaatatactagttaaaattttaagattttaaatgtataaaaaactaataacgtttttatttgtaataggtgcattagcatcctattcgaataatgagtacactccgtttaataaactgagtgtaaaactctatatagatggagtagataatatagaaaattcatatactgatgataataatgaattggtgttaaattttaaagagtacacaatttctattattacagagtcatgcgacgtcggatttgattccatagatatagatgttataaacgactataaaattattgatatgtataccattgactcgtctactattcaacgcagaggtcacacgtgtagaatatctaccaaattatcatgccattatgataagtacccttatattcacaaatatgatggtgatgagcgacaatattctattactgcagagggaaaatgctataaaggaataaaatatgaaataagtatgatcaacgatgatactctattgagaaaacatactcttaaaattggatctacttatatatttgatcgtcatggacatagtaatacatattattcaaaatatgatttttaaaaatttaaaatatattatcacttcagtgacagtagtcaaataacaaacaacaccatgagatatattataattctcgcagttttgttcattaatagtatacacgctaaaataactagttataagtttgaatccgtcaattttgattccaaaattgaatggactggggatggtctatacaatatatcccttaaaaattatggcatcaagacgtggcaaacaatgtatacaaatgtaccagaaggaacatacgacatatccgcatttccaaagaatgatttcgtatctttctgggttaaatttgaacaaggcgattataaagtggaagagtattgtacgggactatgcgtcgaagtaaaaattggaccaccgactgtaacattgactgaatacgacgaccatatcaatttgtacatcgagcatccgtatgctactagaggtagcaaaaagattcctatttacaaacgcggtgacatgtgtgatatctacttgttgtatacggctaacttcacattcggagattctaaagaaccagtaccatatgatatcgatgactacgattgcacgtctacaggttgcagcatagactttgtcacaacagaaaaagtgtgcgtgacagcacagggagccacagaagggtttctcgaaaaaattactccatggagttcgaaagtatgtctgacacctaaaaagagtgtatatacatgcgcaattagatccaaagaagatgttcccaatttcaaggacaaaatggccagagttatcaagagaaaatttaataaacagtctcaatcttatttaactaaatttctcggtagcacatcaaatgatgttaccacttttcttagcatgcttaacttgactaaatattcataactaatttttattaatgatacaaaaacgaaataaaactgcatattatacactggttaacgcccttataggctctaaccattttcaagatgaggtccctgattatagtccttctgttcccctctatcatctactccatgtctattagacaatgtgagaagactgaagaggaaacatggggattgaaaatagggttgtgtataattgccaaagatttctatcccgaaagaactgattgcagtgttcatctcccaactgcaagtgaaggattgataactgaaggcaatggattcagggatatacgaaacaccgataaattataaaaaaagcaatgtgtccgctgtttccgttaataatactattttcgtaactggcggattattcataaataactctaatagcacgatcgtggttaacaatatggaaaaacttgacatttataaagacaaacaatggtcgattatagaaatgcctatggctagggtatatcacggcatcgactcgacatttggaatgttatattttgccggaggtctatccgttaccgaacaatatggtaatttagagaaaaacaacgagatatcttgttacaatcctagaacgaataagtggtttgatatttcatatactatttataagatatccatatcatcattgtgtaaactaaataacgtcttctatgtatttagtaaggacattggatatgtggaaaagtatgatggtgcatggaagttagtacatgatcgtctccccgctataaaggcattatcaacttctccttattgattgaaaatgaaaatataaatagtttttatgtatagcagtattaccctatagttttattgcttactactaacatggatacagatgttacaaatgtagaagatatcataaatgaaatagatagagagaaagaagaaatactaaaaaatgtagaaattgaaaataataaaaacattaacaagaatcatccaagtggatatattagagaagcactcgttattaataccagtagtaatagtgattccattgataaagaagttatagaatgtatctgtcacgatgtaggaatatagatcatatctactaatttttataatcgatacaaaacataaaaaacaactcgttattacatagcaggcatggaatccttcaagtattgttttgataacgatggcaagaaatggattatcggaaatactttatattctggtaattcaatactatataaggtcagaaaaaatttcactagttcgttctacaattacgtaatgaagatagatcacaaatcacacaagccattgttgtctgaaatacgattctatatatctgtattggatcctttgactatcgacaactggacacgggaacgtggtataaagtatttggctattccagatctgtatggaattggagaaaccgatgattatatgttcttcgttataaagaatttgggaagagtattcgccccaaaggatactgaatcagtcttcgaagcatgcgtcactatgataaacacgttagagtttatacactctcaaggatttacccatggaaaaatagaaccgaggaatatactgattagaaataaacgtctttcactaattgactattctagaactaacaaactatacaagagtggaaactcacatatagattacaacgaggacatgataacttcaggaaatatcaattatatgtgtgtagacaatcatcttggagcaacagtttcaagacgaggagatttagaaatgttgggatattgcatgatagaatggttcggtggcaaacttccatggaaaaacgaaagtagtataaaagtaataaaacaaaaaaaagaatataaaaaatttatagctactttctttgaggactgttttcctgaaggaaatgaacctctggaattagttagatatatagaattagtatacacgttagattattctcaaactcctaattatgacagactacgtaaactgtttatacaagattgaaattatattcttttttttatagagtgtggtagtgttacggatatttaatattagactatctctatcgcgctacacgaccaatatcgattactatggatatcttcagggaaatcgcatcttctatgaaaggagagaatgtattcatttctccagcgtcaatctcgtcagtattgacaatactgtattatggagctaatggatccactgctgaacagctatcaaaatatgtagaaaaggaggagaacatggataaggttagcgctcaaaatatctcattcaaatccataaataaagtatatgggcgatattctgccgtgtttaaagattcctttttgagaaaaattggcgataagtttcaaactgttgacttcactgattgtcgcactatagatgcaatcaacaagtgtgtagatatctttactgaggggaaaatcaatccactattggatgaaccattgtctcctgatacctgtctcctagcaattagtgccgtatactttaaagcaaaatggttgacgccattcgaaaaggaatttaccagtgattatcccttttacgtatctccgacggaaatggtagatgtaagtatgatgtctatgtacggcaaggcatttaatcacgcatctgtaaaggaatcattcggcaacttttcaatcatagaactgccatatgttggagatactagtatgatggtcattcttccagacaagattgatggattagaatccatagaacaaaatctaacagatacaaattttaagaaatggtgtaactctctggaagctacgtttatcgatgttcacattcccaagtttaaggtaacaggctcgtataatctggtggatactctagtaaagtcaggactgacagaggtgttcggttcaactggagattatagcaatatgtgtaattcagatgtgagtgtcgacgctatgatccacaaaacgtatatagatgtcaatgaagagtatacagaagcagctgcagcaacttgtgcactggtgtcagactgtgcatcaacaattacaaatgagttctgtgtagatcatccgttcatctatgtgattaggcatgttgatggaaaaattcttttcgttggtagatattgctctccgacaactaattgttaaccattttttttaaaaaatagaaaaaacatgtggtattagtgcaggtcgttattcttccaattgcaattggtaagatgacggccaactttagtacccacgtcttttcaccacagcactgtggatgtgacagactgaccagtattgatgacgtcagacaatgtttgactgaatatatttattggtcgtcctatgcataccgcaacaggcaatgcgctggacaattgtattccacactcctctcttttagagatgatgcggaattagtgttcatcgacattcgcgagctggtaaaaaatatgccgtgggatgatgtcaaagattgtgcagaaatcatccgttgttatataccggatgagcaaaaaaccatcagagagatttcggccatcatcggactttgtgcatatgctgctacttactggggaggtgaagaccatcccactagtaacagtctgaacgcattgtttgtgatgcttgagatgctcaattacgtggattataacatcatattccggcgtatgaattgatgagttgtacatcttgacattttcttctttcttctcttctccctttcccagaaacaaactttttttacccactataaaataaaatgagtatactacctgttatatttctttctatatttttttattcttcattcgttcagacttttaacgcgcctgaatgtatcgacaaagggcaatattttgcatcattcatggagttagaaaacgagccagtaatcttaccatgtcctcaaataaatacgctatcatccggatataatatattagatattttatgggaaaaacgaggagcggataatgatagaattataccgatagataatggtagcaatatgctaattctgaacccgacacaatcagactctggtatttatatatgcattaccacgaacgaaacctactgtgacatgatgtcgttaaatttgacaatcgtgtctgtctcagaatcaaatatagatcttatctcgtatccacaaatagtaaatgagagatctactggcgaaatggtatgtcccaatattaatgcatttattgctagtaacgtaaacgcagatattatatggagcgggcatcgacgccttagaaataagagacttaaacaacggacacctggaattattaccatagaagatgttagaaaaaatgatgctggttattatacatgtgttttagaatatatatacggtggcaaaacatataacgtaaccagaattgtaaaattagaggtacgggataaaataataccttctactatgcaattaccagatggcattgtaacttcaataggtagtaatttgactattgcatgcagagtatcgttgagacctcccacaacggatgcagacgtcttttggataagtaatggtatgtattacgaagaagatgatggggacggaaacggtagaataagtgtagcaaataaaatctatatgaccgataagagacgtgttattacatcccggttaaacattaatcctgtcaaggaagaagatgctacaacgtttacgtgtatggcgtttactattcctagcatcagtaaaacagttactgttagtataacgtgaatgtatgttgttacatttccatgtcaattgagtttataagaatttttatacattatcttccaacaagcaattgacgaacgtattgctatgattaactcccacgatactatgcatattattaatcattaacttgcagactatacctagagctattttgacatactcgtgttcttgtgtaattgcagtatctatattattaaagtacgtaaatctagctatagttttattatttaattttagataatataccgtctccttatttttaaaaattgccacatcctttattaaatcatgaatgggaatttctatgtcatagttaatatattgtgaacaacaagagcagatatctataggaaagggtggaatgcgatacattgatctatgtagttttaaaacacacgcaaactttgaagaatttatataaatcattccatcgatacatccttctatgttgagatgtatatatccaggaattcgtttattaatatcgggaaatgtataaactaaaacattgcccggaagcggagcttctaccggagttatatcagtttttaacttacaaaatgtaaccaatacctttgcatgacttgttttgttcggcaacgttagtttaaacttgacgaatggattaattacaatagcatgatccgcgcatctattaagtttttttactttaacgcccttgtatgtttttacagagactttatctaaatttctagtgcttgtatgtgttataaatataacgggatatagaactgaatcacctaccttagatacccaattacattttatcagatccagataataaacaaattttgtcgccctaactaattctatattgttatatattttacaattggttatgatatcatgtaataacttggaatctaacgcacatcgtcgtacgtttatacaattgtgatttagtgtagtatatctacacatgtatttttccgcgctatagtattctggactagtgataaaactatcgttatatctgtcttcaatgaactcatcgagatattgctctctgtcatattcatacacctgcataaactttctagacatcttacaatccgtgttattttaggatcatatttacatatttacgggtatatcaaagatgttagattagttaatgggaatcgtctataataatgaatattaaacaattatatgaggacttttaccacaaagcatcataaaaatgagtcgtcgtctgatttatgttttaaatatcaaccgcgaatcaactcataaaatacaagagaatgaaatatatacatattttagtcattgcaatatagaccatacttctacagaacttgattttgtagttaaaaactatgatctaaacagacgacaacctgtaactgggtatactgcactacactgctatttgtataataattactttacaaacgatgtactgaagatattattaaatcatggagtggatgtaacgatgaaaaccagtagcggacgtatgcctgtttatatattgcttactagatgttgcaatatttcacatgatgtagtgatagatatgatagacaaagataaaaaccacttattacatagagactattccaacctattactagagtatataaaatctcgttacatgttattaaaggaagaggatatcgatgagaacatagtatccactttattagataagggaatcgatcctaactttaaacaagacggatatacagcgttacattattattatttgtgtctcgcacacgtttataaaccaggtgagtgtagaaaaccgataacgataaaaaaggccaagcgaattatttctttgtttatacaacatggagctaatctaaacgcgttagataattgtggtaatacaccattccatttgtatcttagtattgaaatgtgtaataatattcatatgactaaaatgctgttgacttttaatccgaatttcgaaatatgtaataatcatggattaacgcctatactatgttatataacttccgactacatacaacacgatattcttgttatgttaatacatcactatgaaacaaatgttggagaaatgccgatagatgagcgtcgtataatcgtattcgagtttatcaaaacatattctacacgtcctgcagattcgataacttatttgatgaataggtttaaaaatatagatatttatacccgctatgaaggaaagacattattacacgtagcatgtgaatataataatacacacgtaatagattatcttatacgtatcaacggagatataaatgcgttaaccgacaataacaaacacgctacacaactcattatagataacaaagaaaattccccatataccattaattgtttactgtatatacttagatatattgtagataagaatgtgataagatcgttggtggatcaacttccatctctacctatcttcgatataaaatcatttgagaaattcatatcctactgtatacttttagatgacacattttacaatagacacgttaggaatcgcgattctaaaacgtatcgatacgcattttcaaaatacatgtcgtttgataaatacgatggtataataactaaatgtcataaagaaacaatattgctcaaactatccactgttctagacactacactatatgcagttttaagatgccataattcgaaaaagttaagaagatacctcaccgagttaaaaaaatataataacgataagtcctttaaaatatattctaatattatgaatgagagataccttaatgtatattataaagatatgtacgtgtcaaaggtatatgataaactatttcctgttttcacagataaaaattgtctactaacattactaccttcagaaattatatacgaaatattatacatgctgacaattaacgatctttataatatatcgtatccacctaccaaagtatagttgtatttttctcatgcgatgtgtgtaaaaaaactgatattatataaatattttagtgccgtataataaagatgacgatgaaaatgatggtacatatatatttcgtatcattattgttattgctattccacagttacgccatagacatcgaaaatgaaatcacagaattcttcaataaaatgagagatactctaccagctaaagactctaaatggttgaatccagcatgtatgttcggaggcacaatgaatgatatagccgctctaggagagccattcagcgcaaagtgtcctcctattgaagacagtcttttatcgcacagatataaagactatgtggttaaatgggaaaggctagaaaaaaatagacggcgacaggtttctaataaacgtgttaaacatggtgatttatggatagccaactatacatctaaattcagtaaccgtaggtatttgtgcaccgtaactacaaagaatggtgactgtgttcagggtatagttagatctcatattagaaaacctccttcatgcattccaaaaacatatgaactaggtactcatgataagtatggcatagacttatactgtggaattctttacgcaaaacattataataatataacttggtataaagataataaggaaattaatatcgacgacattaagtattcacaaacgggaaaggaattaattattcataatccagagttagaagatagcggaagatacgactgttacgttcattacgacgacgttagaatcaagaatgatatcgtagtatcaagatgtaaaatacttacggttataccgtcacaagaccacaggtttaaactaatactagatccaaaaatcaacgtaacgataggagaacctgccaatataacatgcactgctgtgtcaacgtcattattgattgacgatgtactgattgaatgggaaaatccatccggatggcttataggattcgattttgatgtatactctgttttaactagtagaggcggtattaccgaggcgaccttgtactttgaaaatgttactgaagaatatataggtaatacatataaatgtcgtggacacaactattattttgaaaaaacccttacaactacagtagtattggagtaaatatacaatgcatttttatatacattactgaataattattattattatttatatcgtatttgtgctataacgcgactatctaggtatttgtatctcaccgatagagaacatataaatgtagactctattaaacagttgtgtaaaatatcagatcctaatgcatgttatagatgtggatgtacggctttacatgagtacttttataattatagatcagtcaacggaaaatacaagtatagatacaacggttactatcaatattatttatctagcgattatgaaaattataatgaatattattatgatgattatgatagaactggtatgaacagtgagagtgataatatatcaatcaaaacagaatatgaattctatgatgaaacacaagatcaaagtacacaactagtaggttacgacattaaactcaaaaccaatgaggatgattttatggctatgatagatcagtgggtgtccatgattatatagatgaatcaattaataaagtagtatatggaagagagtctcacgtaagatggcgggatatatggcaagaacataatgatggcgtatacagtataggaaaggagtgcatagataatatatacgaagacaaccataccgtagacgaattctacaagatagacagcgtatcagatgtagatgacgcggaacacatatctccgataactaatgatgtatctacacaaacatgggaaaagaaatcagagttagatagatacatggaaatgtatcctcgtcatagatatagtaagcattctgtctttaagggattttctgacaaagttagaaaaaatgatttagacatgaatgtggtaaaagaattactttctaacggtgcatctctaacaattaaggatagcagtaataaggatccaataaccgtttattttcgaagaacgataatgaatttagaaatgattgatgaacgaaagtatatagtacactcctatctaaaaaattataaaaatttcgattatccatttttcaggaagttagttttgactaataaacattgtctcaacaattattataatataagcgacagcaaatatggaacaccgctacatatattggcgtctaataaaaaattaataactcctaattacatgaagttattagtgtataacggaaatgatataaacgcacgaggtgaagatacacaaatgcgaactccattacacaaatatttgtgtaaatttgtatatcataatattgaatatggtatccgatactataatgaaaagattatagacgcatttatagagttaggagccgatctaactattccaaatgacgatggaatgataccagtagtttactgtatacactcaaatgccgaatatggttataacaatattactaacataaagataatacgtaaactacttaatcttagtagacgtgcgtcacataatctatttagagatcgagtcatgcacgattatataagtaatacatatattgatcttgagtgtttagatattattagatcgttggatggattcgatatcaatggttactttgaaggacgtacaccacttcattgcgctatacaacataacttcactcagattgctaagtacttattagatcgaggagctgatatagtcgtacccaacacattgattatacatcagtacatacagtaaatagcatagatatggaggaggatacaaatatttcaaataaagttataaggtacaacactgtcaataatatatgggaaacattacctaacttctggactggaactataaatccaggcgtggtctcgcataaagatgatatatatgttgtatgcgacatcaaagatgaaaaaaatgttaaaacttgtatatttagatataacacgaatacgtataacggatgggaattggtcacgacgacagaaagcagattatcagctctgcatactattctttataacaataccataatgatgttacattgttatgaatcgtatatgttacaagatacatttaatgtgtacactcgcgaatggaatcatatgtgtcatcaacattcgaatagttatatcatgtacaatatactacccatctactaaatataatagaataaaataaatgagtatgatcattttagataacgattgattttatcattaccgcttcattcttatattctttgcttacggaacctatatttagaaacatctactaacgattttttatgcttgcattattaatggtatgtaatatgattgattgtgtacgcaataccaatttgttaagtatgaatacggggtacaaacataaactgaagtttaacattatttatttatgatatatatcgttattgtttggtctataccatggatatctttaaagaactaatcttaaaacacacggatgaaaatgttttgatttctccagtttctattttatctactttatctattctaaatcatggagcagctggttctacagctgaacaactatcaaaatatatagagaatatgaatgagaatacacccgatgacaataatgacatggacgtagatattccgtattgtgcgacactagctaccgcaaataaaatatacggtagcgatagtatcgagttccacgcctccttcctacaaaaaataaaagacgattttcaaactgtaaactttaataatgctaaccaaacaaaggaactaatcaacgaatgggttaagacaatgacaaatggtaaaattaattccttattgactagtccgctatccattaatactcgtatgacagttgttagcgccgtccattttaaagcaatgtggaaatatccattttctaaacatcttacatatacagacaagttttatatttctaagaatatagttaccagtgttgatatgatggtgagcactgagaataacttgcaatatgtacatattaatgaattattcggaggattctctattatcgatattccatacgagggaaactctagtatggtaattatactaccggacgacatagaaggtatatataacatagaaaaaaatataacagatgaaaaatttaaaaaatggtgtggtatgttatctactaaaagtatagacttgtatatgccaaagtttaaagtggaaatgacagaaccgtataatctggtaccgattttagaaaatttaggacttactaatatattcggatattatgcagattttagcaagatgtgtaatgaaactatcactgtagaaaaatttctacatacgacgtttatagatgttaatgaggagtatacagaagcatcggccgttacaggagtatttatgactaacttttcgatggtatatcgtacgaaggtctacataaaccatccattcatgtacatgattaaagacaacacaggacgtatactttttatagggaaatactgctatccgcaataaatataaacaaatagacttttatcacgtttatctatgtctaaatattacaaatagtaatagtataaactaaagctgataatacttaaaaaaataataatatcatttacaattaatagtataaactaaaaattaaacaaatcgttattataagtaatatcaaaatgatgatatacggattaatagcgtgtcttatattcgtgacttcatccatcgctagtccactttatattcccgttattccacccatttcggaagataaatcgttcaatagtgtagaggtattagtttccttgtttagagatgaccaaaaagactatacggtaacttctcagttcaataactacactatcgataccaaagactggactatcggcgtactatccacacctgatggtttggatataccattgactaatataacttattggtcacggtttactataggtcgtgcattgttcaaatcagagtctgaggatattttccaaaagaaaatgagtattctaggtgtttctatagaatgtaagaagtcgtcgacattacttacttttttgaccgtgcgtaaaatgactcgagtatttaataaatttccagatatggcttattatcgaggagactgtttaaaagccgtttatgtaacaatgacttataaaaatactaaaactggagagactgattacacgtacctctctaatggggggttgcctgcatactatcgtaatggggtcgatggttgattattgattagtatattccttattctttttattcacacaaaaagaacatttttataaacatgaaaccactgtctaaatgtaattatgatcttgatttatagatgaagatcagcctttagaggattttaaccagtatgtttaatatgaaaaaaataaacataacatattttgagattaagcgctattgtgcaagattatattagaatcaaattaatctttcatacgagaaaaataacgacatacgtcgtcaacaaattaaactttttatttattagttaactagcttatagaacttgctcattgttatgtttctaaaacgggtacgacatataggacaattatccgacgcaccggtttctcttcgtgttttatgccatatattgatgcatgttatgcaaaatatatgagtacacgaatccaataaaccaaagtatctatcgttttgagtaaacaacttcatagcaaattccacattctttttctttacttactctatacacgtcctcgtatttatccagtattttgatgatatccaactcagaaatggttgttgtattattgggtgtattgggagtataggtattattagctatgtaccaatttaccaaccctcttaatattgattgaacaatcacatcggttatccaatcaataaccacattaataactaaattgtagtgtatatatagaccatatatgtttctatttttttgacagttacgtatagtttcagtaagttttgattgttgtattcctgtatctctagataagttagtcatatagtcccttccggcgatacgttttttccaagcccgaaattgattagccaaatgtgtatttatttttgtgatattgatataatatgtaatgttattaatatttcggataatgcatactgttagtcttatatcatttggttcatctatgtattgtaatattgttacatgatctatagatgatgtattgattttggcaggatcgaattccatatccgcgactaaacagtgaaaaaaatgtaaatactttttaaattttaaattagtaaaacttttttttattttttatgattccaaaaatactgaatacaaagtcctaaattataaatatggagatcatactaccacaacttattattatgcatactcagccggtgtaatagatagatatatataattctattacaccggcagacaattaccgatcggtatttgtcgttaccaacataccgtataatatgtaatatacaattccataacccattgacagttgttatacatcaaaattgcaattcttttgattacgatgttataagaatgtagttaattgatgtatgatgttaatgtgtcctctttcctcttataacatcgtaatcaaaaacttttttataatatatacctaataatgtgtcttaatagttctcgtgattcgtcaaacaatcattcttataaaatataataaagcaacgtaaaacacataaaaataagcgtaactaataagacaatggatatttacgacgataaaggtctacagactattaaactgtttaataatgaatttgattgtataaggaatgacatcagagaattatttaaacatgtaactgattccgatagtatacaacttccgatggaagacaattctgatattatagaaaatatcagaaaaatactatatagacgattaaaaaatgtagaatgtgttgacatcgatagtacaataacttttatgaaatacgatccaaatgatgataataagcgtacgtgttctaattgggtacccttaactaataactatatggaatattgtctagtaatatatttggaaacaccgatatgtggaggcaaaataaaattataccaccctacaggaaatataaagtcggataaggatattatgtttgcaaagactctagactttaaatcaaagaaagtgttaactggacgtaaaacaattgccgttctagacatatccgtttcatataatagatcaatgactactattcactacaacgacgacgttgatatagatatacatactgataaaaatggaaaagagttatgttattgttatataacaatagatgatcattacttggttgatgtggaaactataggagttatagtcaatagatctggaaaatgtctgttagtaaataaccatctaggtataggtatcgttaaagataaacgtataagcgatagttttggagatgtatgtatggatacaatatttgacttttctgaagcacgagagttattttcattaactaatgatgataacaggaatatagcatgggacactgataaactagacgatgatacagatatatggactcccgtcacagaagatgattacaaatttctttctagactagtattgtatgcaaaatctcaatcggatactgtattcgactattatgttcttactggtgatacggaaccacccactgtattcattttcaaggtaactagattttactttaatatgccgaaataaaaaatttttgtataatatctagaggtagaggtattgtttagataaatacaaataacatagatacatcgcatacttagcatttttataaatatacataagacatacactttatacattttttttgtaaaaatactcataaaaaaatttataaaaattatggcacaaccatatcttgtataggtagtttagttcgtcgagtgaacctataaacagataatagacaacacgtaataataataatgcctactaatacaagcataataccgggagatgggatatatgacgttgtagtgtttgggttttctgaacgttgatagtctactaatactacatgctgacatctaatgcctgtataaccatgagagcatctacaatacataccgtcaatatctctagcgtggatacagtcaccgtgtaaacaatatccatctccctctggaccgcataatctgatagctggaatatctgttgtagcgtttgtaatttctggcgatgtcgtttcgatagcgttaccactatcggcgaatgatctgattatcatagcagcgaacaacaacatcagatatttcatcgacatttttgatggattttgtgtttatgctgtttctcagtgtgtgtttatgacaagattgggaattttatattattaattcagtaatataaactaataatatattgttaattgtgtaaataatataaaaataacaatacaatattgaatgtgttgctgttaaaaatgatcataaacacggagtttattttatatgtctcgcataaacattactaaaaaaatatattgttctgtttttctttcacatctttaattatgaaaaagtaaatcattatgagatggacgagattgtacgcatcgttcgcgacagtatgtggtacatacctaacgtatttatggacgacggtaagaatgaaggtcacgtttctgtcaacaatgtctgtcatatgtatttcacgttctttgatgtggatacatcgtctcatctgtttaagctagttattaaacactgcgatctgaataaacgaggtaactctccattacattgctatacgatgaatacacgatttaatccatctgtattaaagatattgttacaccacggcatgcgtaactttgatagcaaggatgaaaaaggacaccactatcaatcgataacaagatctttgatatactaacggacaccattgatgactttagtaaatcatccgatctattgctgtgttatcttagatataaattcaatgggagcttaaactattacgttctgtacaaaggatccgacgaggatgaactcacttctcttcattactactgtaaacacatatccacgttctacaaaagcaattattacaagttaagtcacactaagatgcgagccgagaagcgattcatctacgcgataatagattatggagcaaacattaacgcggttacacacttaccttcaacagtataccaaacatagtcctcgtgtggtgtatgctcttttatctcgaggagccgatacgaggatacgtaataatcttgattgtacacccatcatggaacgattgtgcaacaggtcatattctcataatgttactcaattggcacgaacaaaaggaagaaggacaacatctactttatctattcataaaacataatcaaggatacactctcaatatactacggtatctactagataggttcgacattcagaaagacgaatactataataccgcctttcaaaattgtaacaacaatgttgcctcatacatcggatacgacatcaaccttccgactaaagacggtattcgacttggtgtttgaaaacagaaacatcatatacaaggcggatgttgtgaatgacatcatccaccacagactgaaagtatctctacctatgattaaatcgttgttctacaagatgtctctccctacgacgattactacgtaaagaagataatagcctactgcctattaagggacgagtcattcgcggaactacatagtaaattctgtttaaacgaggactataaaagtgtatttatgaaaaatatatcattcgataagatagattccatcatcgtgacataagtcgccttaaagagattcgaatctccgacaccgacctgtatacggtatcacagctatcttaaagccatacattcagacagtcacatttcatttcccatgtacgacgatctcatagaacagtgccatctatcgatggagcgtaaaagtaaactcgtcgacaaagcactcaataaattagagtctaccatcggtcaatctagactatcgtatttgcctccggaaattatgcgcaatatcatctaaacagtatgttgtacgaaaagaaccattacaaatattatccatgatagaaagaaaatatctatatgattggagaagtaggaaacaggaacaagacgacgattactacattattaaatcatgaagtccgtattatactcgtatatattgtttctctcatgtataataataaacggaagagatatagcaccgcatgcaccatccgatggaaagtgtaaagacaacgaatacaaacgccataatttgtgtccgggaacatacgcttccagattatgcgatagcaagactaacacacaatgtacgccgtgtggttcgggtaccttcacatctcgcaataatcatttacccgcttgtctaagttgtaacggaagacgcgaccgtgtaacacgactcacaatagaatctgtgaatgctctcccggatattattgtcttctcaaaggatcatccggatgcaaggcatgtgtttcccaaacaaaatgtggaataggatacggagtatccggagacgtcatctgttctccgtgtggtctcggaacatattctcacaccgtctcttccgcagataaatgcgaacccgtacccagtaatacctttaactatatcgatgtggaaattaatctgtatccagttaacgaccactaccggtctcagcgaatccatctcaacgtcggaactaactattactatgaatcataaagactgtaatcccgtatttcgtgaggaatacttctccgtccttaataaggtagcaacttcaggtttctttacaggagaaaggtgtgcactctgaatttcgagattaaatgcaataacaaaaatttttcctccaaacagttaacgaaagcaaagaatgatgacggtatcatgccgcattcggagactgtctatctagcgtcgacatctatatactatatagtaataccaatactcaagactacgaaactgatacaatctcttatcatgtgggtaatgttctcgatgtcgatagccatatgcccggtagttgcgatatacataaactgatcactaattccaaacccacccgctttttatagtaagtttttcacccataaataataaatacaataattaatttctcgtaaaagtagaaaatatattctaatttattgcacggtaaggaagtagaatcataaagaacagtactcaatcaatagcaatcatgaaacaatatatcgtcctggcatgcatgtgcctgccagtcttcagcaatcatcctcatcctcctcctcgtgtacggaagaagaaaacaaacatcatatgggaatcgatgttattatcaaagtcacaaagcaagaccaaacaccgaccaatgataagatttgccaatccgtaacggaaattacagagtccgagtcagatccagatcccgaggtggaatcagaagatgattccacatcagtcgaggatgtagatcctcctaccacttattactccatcatcggtggaggtctgagaatgaactttggattcaccaaatgtcctcagattaaatccatctcagaatccgctgatggaaacacagtgaatgctagattgtccagcgtgtccccaggacaaggtaaggactctcccgcgatcactcatgaagaagctctggctatgatcaaagactgtgaggtgtctatcgacatcagatgtagcgaagaagagaaagacagcgacatcaagacccatccagtactcgggtctaacatctctcataagaaagtgagttacgaagatatcatcggttcaacgatcgtcgatacaaaatgtgtcaagaatctagagtttagcgttcgtatcggagacatgtgcaaggaatcatctgaacttgaggtcaaggatggatttaagtatgtcgacggatcggcatctgaaggtgcaaccgatgatacttcactcatcgattcaacaaaactcaaagcgtgtgtctgaatcgataactctattcatctgaaattggatgagtagggttaatcgaacgattcaggcacaccacgaattaaaaaagtgtaccggacactatattccggtttgcaaaacaaaaatgttcttaactacattcacaaaaagttacctctcgcgacttcttctttttctgtctcaatagtgtgatacgattatgacactattcctattcctattcctatttcctttcagggtatcacaaaaatattaaacctctttctgatggtctcataaaaaaagttttacaaaaatatttttattctctttctctctttgatggtctcataaaaaaagttttacaaaaatatttttattctctttctctctttgatggtctcataaaaaaagttttacaaaaatatttttattctctttctctctttgatggtctcataaaaaaagttttacaaaaatatttttattctctttctctctttgatggtctcataaaaaaagttttacaaaaatatttttattctctttctctctttgatggtctcataaaaaaagttttacaaaaatatttttattctctttctctctttgatggtctcataaaaaaagttttacaaaaatatttttattctctttctctctttgatggtctcataaaaaaagttttacaaaaatatttttattctctttctctctttgatggtctcataaaaaatattaaacctctttctgatggtgtcactaaaatatttttattctcattctcattttctctttctctcttcaatggagtcataaaatatttttattctctttctctcttcgatggtctcacaaaaatattaaacctctttctgatggtgtcactaaaatatttttattctcattctcattttctctttctctcttcaatggagtcataaaatatttttattctctttctctcttcgatggtctcacaaaaatattaaacctctttctgatggagtcgtaaaaaagttttatctctttctctcttcgatggtctcacaaaaatattaaacctctttctgatggagtcgtaaaaaagttttatctctttctctcttcgatggtctcacaaaaatattaaacctctttctgatggagtcgtaaaaaagttttatctctttctctcttcgatggtctcacaaaaatattaaacctctttctgatggagtcgtaaaaaagttttatctctttctctcttcgatggtctcacaaaaatattaaacctctttctgatggagtcgtaaaaaagttttatctctttctctcttcgatggtctcacaaaaatattaaacctctttctgatggagtcgtaaaaaagttttatctctttctctcttcgatggtctcacaaaaatattaaacctctttctgatggagtcgtaaaaaagttttatctctttctctcttcgatggtctcacaaaaatattaaacctctttctgatggagtcgtaaaaaagttttatctctttctctcttcgatggtctcacaaaaatattaaacctctttctgatggagtcgtaaaaaagttttatctctttctctcttcgatggtctcacaaaaatattaaacctctttctgatggagtcgtaaaaaagttttatctctttctctcttcgatggtctcacaaaaatattaaacctctttctgatggagtcgtaaaaaagttttatctctttctctcttcgatggtctcacaaaaatattaaacctctttctgatggagtcgtaaaaaagttttatctctttctctcttcgatggtctcacaaaaatattaaacctctttctgatggagtcgtaaaaaagttttatctctttctctcttcgatggtctcacaaaaatattaaacctctttctgatggagtcgtaaaaaagttttatctctttctctcttcgatggtctcacaaaaatattaaacctctttctgatggagtcgtaaaaaagttttatctctttctctcttcgatggtctcacaaaaatattaaacctctttctgatggagtcgtaaaaaagttttatctctttctctcttcgatggtctcacaaaaatattaaacctctttctgatggagtcgtaaaaaagttttatctctttctctcttcgatggtctcacaaaaatattaaacctctttctgatggagtcgtaaaaaagttttatctctttctctcttcgatggtctcactaaaatattttttattctctttctgatgcatcaactatttcttaaacaataacgtccaacaacatatactcgtcgagcttatcaacatcccctatgcccatctaggttaccagacaattgtatatcataaaataatgtttataatttacacgttaaaatcatataataaaacgtagatcgtataatattttttggtatataaatgatctagtaaaatccatgtaggggatactgctcacattttttctttggtacaaaatttcacacaagtttttatacagacaaattcttgtccatatattttaaaacattgacttttgtactaagaaaaatatctagatcaactatctctttctctttctctcttcgatggtctcacaaaaatattaaacctctttctgatggagtcgtaaaaaagttttatctctttctctcttcgatggtctcacaaaaatattaaacctctttctgatggagtcgtaaaaaagttttatctctttctctcttcgatggtctcacaaaaatattaaacctctttctgatggagtcgtaaaaaagttttatctctttctctcttcgatggtctcacaaaaatattaaacctctttctgatggagtcgtaaaaaagttttatctctttctctcttcgatggtctcacaaaaatattaaacctctttctgatggagtcgtaaaaaagttttatctctttctctcttcgatggtctcacaaaaatattaaacctctttctgatggagtcgtaaaaaagttttatctctttctccttcgatggtctcacaaaaatattaaacctctttctgatggagtcgtaaaaaagttttatctctttctctcttcgatggtctcacaaaaatattaaacctctttctgatggagtcgtaaaaaagttttatctctttctctcttcgatggtctcacaaaaatattaaacctctttctgatggagtcgtaaaaaagttttatctctttctccttcgatggtctcacaaaaatattaaacctctttctgatggagtcgtaaaaaagttttatctctttctccttcgatggtctcacaaaaatattaaacctctttctgatggagtcgtaaaaaagttttatctctttctctcttcgatggtctcacaaaaatattaaacctctttctgatggagtcgtaaaaaagttttatctctttctctcttcgatggtctcacaaaaatattaaacctctttctgatggtctctataaagcgatcgatctttcttacactctagagtttcctacagtcatgggtcacacatttttttctagacactaaataaaattagtaaaattaaattaattataaaattatatatataatttactaactttagttagataaattaataatatataagttttagtacattaatattatattttaaat

SEQ ID NO: 11 - DNA, 191737 bp, Vaccinia virus
  Vaccinia virus Copenhagen
gtaaaattaaattaattataaaattatgtatatgatttactaactttagttagataagttagtaatacataaattttagtatattaatattatattttaaatatttatttagtgtctagaaaaaaatgtgtgaccaacgaccgtaggaaactctagagggtaagaaaaatcaatcgctttatagagaccatcagaaagaggtttaatatttttgtgagaccatcgaaggagaaagagataaaacttttttacgactccatcagaaagaggtttaatatttttgtgagaccatcgaaggagaaagagataaaacttttttacgactccatcagaaagaggtttaatatttttgtgagaccatcgaaggagaaagagataaaacttttttacgactccatcagaaagaggtttaatatttttgtgagaaaggagaaagagataaaacttttttacgactccatcagaaagaggtttaatatttttgtgagaccatcgaaggagaaagagataaaacttttttacgactccatcagaaagaggtttaatatttttgtgagaccatcgaaggagaaagagataaaacttttttacgactccatcagaaagaggtttaatatttttgtgagaccatcgaaggagaaagagataaaacttttttacgactccatcagaaagaggtttaatatttttgtgagaccatcgaaggagactccatcagaaagaggtttaatatttttgtgagaaaggagaaagagataaaacttttttacgactccatcagaaagaggtttaatatttttgtgagaaaggagaaagagataaaacttttttacgactccatcagaaagaggtttaatatttttgtgagaccatcgaaggagaaagagataaaacttttttacgactccatcagaaagaggtttaatatttttgtgagaccatcgaaggagaaagagataaaacttttttacgactccatcagaaagaggtttaatatttttgtgagaccatcgaagagagaaagagataaaacttttttacgactccatcagaaagaggtttaatatttttgtgagaccatcgaagagagaaagagataaaacttttttacgactccatcagaaagaggtttaatatttttgtgagaccatcgaagagagaaagagataaaacttttttacgactccatcagaaagaggtttaatatttttgtgagaccatcgaagagagaaagagataaaacttttttacgactactccatcagaaagaggtttaatatttttgtgagaccatcgaagagagaaagagataaaacttttttacgactccatcagaaagaggtttaatatttttgtgagaccatcgaagagagaaagagataaaacttttttacgactccatcagaaagaggtttaatatttttgtgagaccatcgaagagagaaagagataaaacttttttacgactccatcagaaagaggtttaatatttttgtgagaccatcgaagagagaaagagataaaacttttttacgactccatcagaaagaggtttaatatttttgtgagaccatcgaagagagaaagagataaaacttttttacgactccatcagaaagaggtttaatatttttgtgagaccatcgaagagagaaagagataaaacttttttacgactccatcagaaagaggtttaatatttttgtgagaccatcgaagagagaaagagataaaacttttttacgactccatcagaaagaggtttaatatttttgtgagaccatcgaagagagaaagagataaaacttttttacgactccatcagaaagaggtttaatatttttgtgagaccatcgaagagagaaagagataaaacttttttacgactccatcagaaagaggtttaatatttttgtgagaccatcgaagagagaaagagataaaacttttttacgactccatcagaaagaggtttaatatttttgtgagaccatcgaagagagaaagagataaaacttttttacgactccatcagaaagaggtttaatatttttgtgagaccatcgaagagagaaagagataaaacttttttacgactccatcagaaagaggtttaatatttttgtgagaccatcgaagagagaaagagataaaacttttttacgactccatcagaaagaggtttaatatttttgtgagaccatcgaagagagaaagagataaaacttttttacgactccatcagaaagaggtttaatatttttgtgagaccatcgaagagagaaagagataaaacttttttacgactccatcagaaagaggtttaatatttttgtgagaccatcgaagagagaaagagataaaacttttttacgactccatcagaaagaggtttaatatttttgtgagaccatcgaagagagaaagagataaaacttttttacgactccatcagaaagaggtttaatatttttgtgagaccatcgaagagagaaagagataaaacttttttacgactccatcagaaagaggtttaatatttttgtgagaccatcgaagagagaaagagataaaacttttttacgactccatcagaaagaggtttaatatttttgtgagaccatcgaagagagaaagataaaacttttttacgactccatcagaaagaggtttaatatttttgtgagaccatcgaagagagaaagagataaaacttttttacgactccatcagaaagaggtttaatatttttgtgagaccatcgaagagagaaagagataaaacttttttacgactccatcagaaagaggtttaatatttttgtgagaccatcgaagagagaaagagaaagagatagttagtctagatatttttcttagtacaaaagtcaatgttttaaaatatatggacaagaatttgtctgtataaaaacttgtgtgaaattttgtaccaaagaaaaaatgtgagcagtatcccctacatggattttactagatcatttatataccaaaaaatattatacgatctacgttttattatatgattttaacgtgtaaattataaacattattttatgatatacaattgtctggtaacctagatgggcataggggatgttgataagctcgacgagtatatgttgttggacgttattgtttaagaaatagttgatgcatcagaaagagaataaaaaatattttagtgagaccatcgaagagagaaagagataaaacttttttacgactccatcagaaagaggtttaatatttttgtgagaccatcgaagagagaaagagaataaaaatattttatgactccattgaagagagaaagagaaaatgagaatgagaataaaaatattttagtgacaccatcagaaagaggtttaatatttttgtgagaccatcgaagagagaaagagaataaaaatattttatgactccattgaagagagaaagagaaaatgagaatgagaataaaaatattttagtgacaccatcagaaagaggtttaatattttttatgagaccatcaaagagagaaagagaataaaaatatttttgtaaaactttttttatgagaccatcaaagagagaaagagaataaaaatatttttgtaaaactttttttgtgagaccatcgaagagagaaagagaataaaaatatttttgtaaaactttttttatgagaccatcaaagagagaaagagaataaaaatatttttgtaaaactttttttatgagaccatcaaagagagaaagagaataaaaatatttttgtaaaactttttttatgagaccatcaaagagagaaagagaataaaaatatttttgtaaaactttttttatgagaccatcaaagagagaaagagaataaaaatatttttgtaaaactttttttatgagaccatcaaagagagaaagagaataaaaatatttttgtaaaactttttttatgagaccatcaaagagagaaagagaataaaaatatttttgtaaaactttttttatgagaccatcagaaagaggtttaatatttttgtgataccctgaaaggaaataggaataggaataggaatagtgtcataatcgtatcacactattgagacagaaaaagaagaagtaacgagaggtaactttttgtgaatgtagttaagaacatttttgttttgcaaaccggaatatagtgtccggtacacttttttaattcgtggtgtgcctgaatcgttcgattaaccctactcatccaatttcagatgaatagagttatcgattcagacacacgctttgagttttgttgaatcgatgagtgaagtatcatcggttgcaccttcagatgccgatccgtcgacatacttgaatccatccttgacctcaagttcagatgattccttgcacatgtctccgatacgaacgctaaactctagattcttgacacattttgtatcgacgatcgttgaaccgatgatatcttcgtaactcactttcttatgagagatgttagacccgagtactggatgggtcttgatgtcgctgtctttctcttcttcgctacatctgatgtcgatagacacctcacagtctttgatcatagccagagcttcttcacgagtgatcgcgggagagtccttaccttgtcctggggacacgctggacaatctagcattcactgtgtttccatcagcggattctgagatggatttaatctgaggacatttggtgaatccaaagttcattctcagacctccaccgatgatggagtaataagtggtaggaggatctacatcctcgactgatgtggaatcatcttctgattccacctcgggatctggatctgactcggactctgtaatttccgttacggattggcaaatcttatcattggtcggtgtttggtcttgctttgtgactttgataataacatcgattcccatatgatgtttgttttcttcttccgtacacgaggaggaggatgaggatgattgctgaagactggcaggcacatgcatgccaggacgatatattgtttcataattgctattgattgagtactgttctttatgattctacttccttaccatgcaataaattagaatatattttctacttttacgagaaattaattattgtatttattatttatgggtgaaaaacttactataaaaagcgggtgggtttggaattagtgatcagtttatgtatatcgcaactaccgggcatatggctatcgacatcgagaacattacccacatgataagagattgtatcagtttcgtagtcttgagtattggtattactatatagtatatagatgtcgacgctagatatacagtctccgaatgcggcatgataccgtcatcattctttgctttcgttaactgtttggaggaagaatctttgttattgcatttaatctcgaaattcagagtgcacacctttctcctgtaaagaatcctgaagtcgctaccttattaagaacggagaagtatccatcacgaaatacgggattacagtctttatgattcatagtaatagttagttccgacgttgagatggattcactgagaccggtagtggtcgtccgagtacacgacgtgtcgttgacgggatacagattaatttccacatcgatatagttaaaggtatttctgggtacgggttcgcatttatctgcggaagagacggtgtgagaatatgttccgagaccacacggagaacagatgacgtctccggatactccgtatcctattccacattttgtttgggaaacacatgccttgcatccggatgatcctttgagaagacaataatatccgggagagcattcacagattctattgtgagtagtgttacacgatcgcgtcttccgttacaacttagacaagcgggtaaatgattattgcgagatgtgaaggtacccgaaccacacggcgtacattgtgtgttagtcttgctatcgcataatctggaagcgtatgttcccggacacaaattatggcgtttgtattcgttgtctttacactttccatcggatggtgcatgcggtgctatatctcttccgtttattattatacatgagagaaacaatatatacgagtataatacggacttcataatttaataatgtagtaatcgttgtcgtgttcctgtttcctacttctccaatcatatagatattttctttctatcatggataatatttgtaatggttctttccgtacaacatactgtttagatgatattgcgcataatttccggaggcaaatacgatagtctagattgaccgatggtagactctaatttattgagtgctttgtcgacgagtttacttttacgctccatcgatagatggcactgttctatgagatcgtcgtacatgggaaatgaaatgtgtctgtccgaatgtatggcttcaagatagctgtgataccgtatacaggtcggtgtcggagattcgaatctctttgaggcgacttatgtcacgatgatggaatctatcttatcgaatgatatatttttcataaatacacttttatagtcctcgtttaaacagaatttactatgtagttccgcgaatgactcgtcccttaataggcagtaggctagtatcttttttacgtagtaatcgtcgtagggagagaattctgacatcttgtagaacaacgatttaatcataggtagagatactttcagtctgtggtggatgatgtcattcacaacatccgccttgtatatgatgtttctgttttcaaacaccaagtcgaataccgtctttagtcggaaggttgatgtcgtatccgatgtatgaggcaacattgttgttacaattttgaaaggcggtatatgtattcgtctttctgaatgtcgaacctatctagtagataccgtagtatattgagagtgtatccttgattatgttttatgaatagataaagtagatgttgtccttcttccttttgttcgtgccaattgagtaacattatgagaatatgacctgttgcacaatcgttccatgatgggtgtacaatcaagattattacgtatcctcgagataaaagagcatacaccacacgaggactatgtttggtatactgttgaaggtaagtgtgtaaccgcgttaatgtttgctccataatctattatcgcgtagatgaatcgcttctcggctcgcatcttagtgtgacttaacttgtaataattgcttttgtagaacgtggatatgtgtttacagtagtaatgaagagaagtgagttcatcctcgtcggcgcaattagggtcggatcctttgtacagaacgtagtagtttaagctcccattgaatttatatctaagataacacagcaatagatcggatgatttactaaagtcatcaatggtgtccgttagtatatcaaagatcttgttatcgattgatagtgaatgaatcagatagtggtgtcctttttcatccttgctatcaaagttacgcatgccgtggtgtaacaatatctttaatacagatggattaaatcgtgtattcatcgtatagcaatgtaatggagagttacctcgtttattcagatcgcagtgtttaataactagcttaaacagatgagacgatgtatccacatcaaagaacgtaaaatacatatgacaaacattgttgacagaaacgtgaccttcattcttaccgtcgtccataaatacgttaggtatgtaccacatactgtcgcgaacgatgctcacaatctcgtccatctcgcccatctcatacatttcatcatttactttttcataattagagatgtacgaaagaaaaagaaaaagaaaaagaaaaacagaacaatatatttttttagtaatgtttatgcgagacatataaaataaactccgtgtttatgatgccggtaaatgtttttatcatcttggacggaatcgattttgtaatatgtcatggaaacaaatgaaacaggacattatcactccatgataaattatttaatggagtaataaagtatctccatgggtaatttcgaaatcaagttatcgtctgtattaatgttgtccactatggagtcgatcctctcactgttctttacagtttctgtaatgatggacgttagttcttttttgtaccatttgatgtcggattctttgcgtatctcagtctgtggcgtttgcttcgtttaaataatatatcaaacatggagacgcctgatatgtaggcattcttcattctattaatgtctactctatagcgctttagttccttatgatgaccggcgatatcatacttactttagaaggaaaatcatcatctaggattaaggcgtatctgatacaggcgaataatggttcaggatatagatagcgtatatctctattaaatgcgtcaatcatagtctctagagtgggatggtagctaagtaataaatcaactatcctcgttttgttttctctttggtaactgcttttctggatggccgtattgattatcgagcgtgatgttgtaacactcgctccatattccaataaccgctttgcaaattgtatattattgacatcgaccgcgtaatatagtagagttttattctcattatcgatcatatctatatcatccatgtacttgcttagtatatcaaatacatctattagtatggtttcataacagtgatacccgcaattattaaatctcgataatatcagaccgtacatacatagacggccattgttagatatgtgatttacagccgcgtgtccatattttccacgataaaccttacgacgtttacatcgacgagattattattaacaaagtagtcgtgcagaggatagttgttgtccgttatctaacatgcatcgaacgaccatatcgccgtaatgtaagtagtttatcaacatggcttgtacgatggattcatcctgttgtctaaatctctttagaatgttatcgatgatgtagtggttatattctctggaatcgtacgaagtaatactacgcattacgtcgacaagagtatgacgtctctcaataagaagattaacgatttccatgtctacattatatggggttactctaaatcgcttgtttagataatacgcctctaatatagggctgacgtcgtatactctacacgtgtccacatcctttattaataataatttaacaatctctatatctatggttgagaaagaccagtagtattggatgggtaaagatcctccttcgtctctgccatggatggaaacattgttattgatcaaacatttaattacatccttggatagagattgagattctctatgagacgatatatagtaatgaagagagttcttacacatatcactgttgtacatacaggtacgaaatacgtaaccggtgctgtaacattctgatttaagaagccatagcaatacttctggtctcggattaggcgtcgttacgtatatatccaccaatccgagaccattgattgcataattcgtattcttggacggacgtatccgtttatccacaattaggtattttagcagacgtaagtcgatattatccgaagacagatcgaaatcatttatattcgacttgagttcgttagaggaattcgaatagctggatatcagtagatgcacaatctgagattttacgtatctatgcttactgtatgctcctagcggagttaatccttcgttgtttctacaaagtctctcgactccgcgagagagtaacagtcgaacaatcttaatgtctgtatcgcatttattggagacgtaacaatgtagcgcattgtttcctcgtctatctatatgttttgataagttgtgacacgtttcaatctctagttttatttttttgtacgtcacatcttcatccagtagacgacatagaatagtgcactctctaccacaataatccatagctattctggtgctaattattcctatttcacgaaaaatgatgaaggcaatcattcctcataagatgataaaaagtgtagtgagagagcatgaaggagatttagtatttagcagtgcggatatgatccaagagggtgagatagtcgttctcgttcagaatctttcgcagcataagtagtatgtcgatatacttatcgttgaagactcttccagagacgatagctgattgagtacaaagtccaatgattgcacgaagttcttcggcggttttcatggagtcatttctgatgaaacatttaatgatctccacgcaattgtcgatattgtcccacggaagtgaatccttcaactcaccaccaaagagctccgttgcatcagttctgaaagagatgagaagcctgtagagagaccctgcgctttctctatgggtccatctatgagaaacccacaggatgtattcagtcagacaatgtctgacgtcggccacggtattcagggagtccttagtagcgtggcaatgacagggtctgaactgggcacaaggaaaggccattgtaaaggtagacctgtagccgtttatgctaatagagggctttaatttccatttttttaatgggttgtggatgaggaatgagagtgatatcatattgagatacgtagttatgtagaggtgtatttcctatattatttactttcggtttcatattttaccaactctttaataaatttcttttcacgatgcatcttattgaatgacgttttctcataagtggacatatagatgcagaagtaatgaagaaaagtattacctctatcatctacataattagggtctgctcctttttttaacaacttatacagtacgtagtagtagtttatcggttttaaatcaagtctagaatatatagtggattaatatatttttatattagctaaagctatctatactatcagaaagcatatcattctcaacttcatcatgagttaaatatttgtgtaatggatgtcatgaacattaaacgtattcatgacatactcctttaataggttttttaaaacagatgattcaaatccttcattcattagataacagtgtaacggagtcgtaccttctactagtttgtttatatcacagcattctacaaacagtctaaacaatagagaagacggacagactttaacgtataaatgacacatgttatcgatattcgttgatgaattattattaaacgtagttatgataaatgattctaacgacatctctcgctagagataaaatctagtatcgtatcattaaacatctttgcatcatactcgcatagcatagtttttcataattaatacaatatttaaaagacttattcggaaagtattttaatacatgtatcatcgatggagatccatatgaggagtcacttgtagttcttcagtagtaataacagtgctatcatcgatagtataattatatgtagaaggttcatatgttgttgtaattggagtaactgttggtagttcttccgtggaatcaataattatactaacagcaatagtataattatataaatatgttccgttgatatcacatattttaatgaactcatttctaacaccctcagctatatctgtccaattaaatgtagccaacaatctactacgttctctttgattgactacttgtacggtagcgacgctacactatctttattgtcttctacatgctccaattgaatgtcatgatacaacgcagtttttcttatgcatgtttcataacaccacgaacatgtcgcagtaagatatatagccagagataatttctgtaaattcatgattgccggtcataaacaagcccgtcaataattgtggctatatattcagtttatagagcaaaataattaagcacaatagcgcttaatctcaaaatatgttatgtttatttttttcatattaaacatactggttaaaatcctctaaaggctgatcttcatctataaatcaagatcataattacatttagacagtggtttcatgtttataaaaatgttctttttgtgtgaataaggaatatactaatcaataatcaaccatcgaccccattacgatagtatgcaggcaacccccattagagaggtacgtgtaatcagtctctccagttttagtatttttataagtcattgttacataaacggcttttaaacagtctcctcgataataagccatatctggaaatttattaaatactcgagtcattttacgcacggtcaaaaaagtaagtaatgtcgacgacttcttacattctatagaaacacctagaatactcattttcttttggaaaatatcctcagactctgatttgaacaatgcacgacctatagtaaaccgtgaccaataagttatattagtcaatggtatatccaaaccatcaggtgtggatagtccagtctttggtatcgatagtgtagttattgaactgagaagttaccgtatagtctttttggtcatctctaaacaaggaaactaatacctctacactattgaacgatttatcttccgtaatgggtggactagcgatggatgaagtcacgaatataagacacgctattaatccgtatatcatcattttgatattacttataataacgatttgtttaatttttagtttatactattaattgtaaatgatattattatttttttaagtattatcagctttagtttatactattactatttgtaatatttagacatagataaacgtgataaaagtctatttgtttatatttattgcggatagcagtatttccctataaaaagtatacgtcctgtggtgtctttaatcatgtacatgaatggatggtttatgtagaccttcgtacgatataccatcgaaaagttaatcgtaaatactcctgtaacggccgatgcttctgtatactcctcattaacatctataaacgtcgtatgtagaaatttttctacagtgatagtttcattacacatcttgctaaaatctgcataatatccgaatatattagtaagtcctaaattttctaaaatcggtaccagattatacggttctgtcatttccactttaaactttggcatatacaagtctatacttttagtagataacataccacaccattttttaaatttttcatctgttatatttttttctatgttatatataccttctatgtcgtccggtagtataatcaccatactagagtttccctcgtatggaatatcgataatagagaatcctccgaataattcattaatatgtacatattgcaagttattctcggtacccaccatcatatcaacactggtaactatattcttagaaatataaaacttgtctgtatatgtaagatgtttagaaaatggatatttccacattgctttaaaatggacggcgctaacaactgtcatacgagtattaatggatagcggactagtcaataaggaattaattttaccatttgtcattgtcttaacccattcgttgattagttcctttgtttggttagcattattaaagtttacagtttgaaaatcgtcttttattttttgtaggaaggaggcgtggaactcgatactatcgctaccgtatattttatttgcggtagctagtgtcgcacaatacggaatatctacgtccatgtcattattgtcatcgggtgtattctcattcatattctctatatattttgatagttgttcagctgtagaaccagctgctccatgatttagaatagataaagtagataaaatagaaactggagaaatcaaaacattttcatcagggtgttttacgattagttctttaaagatatccatggtatagaccaaacaataacgataacgatatatatcataaataaataatgttaaatttcagtttatgtttgtaccccgtattcatacttaacaaattggtattgcgtacacaatcaatcatattacataccattaataatgcaagcataaaaaatcgttagtagatgtttctaaatataggttccgtaagcaaagaatataagaatgaagcggtaatgataaaatcaatcgttatctaaaatgatcatactcatttattttattctattatattaacacatacatttttaacagcaacacattcaatattgtattgttatttttatattatttacacaattaacaatatattattagtttatattactgaattaataatataaaattcccaatcttgttataaacacacactgagaaacagcataaacacagaatccatcaaaaatgtcgatgaaatatctgatgttgttgttcgctgctatgataatcagatcattcgccgatagtggtaacgctatcgaaacgacattgccagaaattacaaacgctacaacagatattccagctatcagattatgcggtccagagggagatggatattgtttacacggtgactgtatccacgctagagatatcgacggtatgtattgtagatgctctcatggttatacaggcattagatgtcagcatgtagtattagtagactatcaacgttcagaaaacccaaacactacaacgtcatatatcccatctcccggtattatgcttgtattagtaggcattattattattattacgtgttgtctattatctgtttataggttcactcgaagaactaataaactacctctacaagatatggttgtgccataatttttataaattttttttatgagtatttttacaaaaatgtataaagtgtatgtcttatgtatatttataaaaatgctaaatatgcgatgtatctatgttatttgtatttatctaaacaatacctctacctctagatattatacaaaaattttttatttcagcatattaaagtaaaatctagttaccttgaaaatgaatacagtgggtggttccgtatcaccagtaagaacataatagtcgaatacagtatccgattgagattttgcatacaatactagtctagaaagaaatttgtaatcatcttctgtgacgggagtccatatatctgtatcatcgtctagtttatcagtgtcccatgctatattcctgttatcatcattagttaatgaaaataactctcgtgcttcagaaaagtcaaatattgtatccatacatacatctccaaaactatcgcttatacgtttatctttaacgatacctatacctagatggttatttactaacagacattttccagatctattgactataactcctatagtttccacatcaaccaagtaatgatcatctattgttatataacaataacataactcttttccgtttttatcagtatgtatatctatattaacgtcgtcgttgtagtgaatagtagttattgatctattatatgaaacggatatgtctagaacggcaattgttttacgtccagttaacactttctttgatttaaagtctagagtctttgcaaacataatatccttatccgactttatatttcctgtagggtggtataattttattttgcctccacatatcggtgtttccaaatatattactagacaatattccatatagttattagttaagggtacccaattagaacacgtacgcttattatcatcatttggatcgtatttcataaaagttattgtactatcgatgtcaacacattctacattttttaatcgtctatatagtatttttctgatattttctataatatcagaattgtcttccatcggaagttgtatactatcagaatcagttacatgtttaaataattctctgatgtcattccttatacaatcaaattcattattaaacagtttaatagtctgtagacctttatcgtcgtaaatatccattgtcttattagttacgcttatttttatgtgtttttacgttgctttattatattttataagaatgattgtttgacgaatcacgagaactattaagacatatattattagaggtatatattataaaaaagtttttgattacgatgttataagaggaaagaggacacattaacatcatacatcaattaactacattcttataacatcgtaatcaaaagaattgcaattttgatgtataacaactgtcaatgggttatggaattgtatattacatattatacagtatgttggtaacgacaaataccgatcggtaattgtctgccggtgtaatagaattatatatatctatctattacaccggctgagtacctacactattatatgattatagtttctatttttacagtaccttaactaaagtctctagtcacaagagcaatactaccaacctacactattatatgattatagtttctatttttataggaacgcgtacgagaaaatcaaatgtctaatttctaacggtagtgttgataaacgattatcgtcaatggatacctcctctatcatgtcgtctattttcttactttgttctattaacttattagcattatatattatttgattataaaacttatattgcttattagcccaatctgtaaatatcggattattaacatatcgtttctttgtaggtttatttaacatgtacatcactgtaagcatgtccgtaccatttattttaatttgacgcatatccgcaatttctttttcgcagtcggttataaattctatatatgatggatacatgctacatgtgtacttataatcgactaatatgaagtacttgatacatattttcagtaacgatttattattaccacctatgaataagtacctgtgatcgtctaggtaatcaactgttttcttaatacattcgatggttggtaatttactcagaataatttccaatatcttaatatataattctgctatttctggaatatatttatctgccagtataacacaaatagtaatacatgtaaacccatattttgttattatattaatgtctgcgccattatctattaaccattctactaggctgacactatgcgacttaatacaatgataaagtatactacatccatgtttatctattttgtttatatcatcaatatacggcttacaaagttttagtatcgataacacatccaactcacgcatagagaaggtagggaataatggcataatatttattaggttatcatcattgtcattatctacaactaagtttccattttttaaaatatactcgacaactttaggatctctattgccaaatttttgaaaatatttatttatatgcttaaatctatataatgtagctccttcatcaatcatacatttaataacattgatgtatactgtatgataagatacatattctaacaatagatcttgtatagaaactgtatatcttttaagaattgtggatattaggatattattacgtaaactattacacaattctaaaatataaaacgtatcacggtcgaataatagttgatcaactatataattatcgattttgtgatttttcttcctaaactgtttacgtaaatagttagatagaatattcattagttcatgaccactatagttactatcgaataacgcgtcaaatatttcccgtttaatatcgcatttgtcaagataataatagagtgtggtatgttcacgataagtataataacgcatctcttttttgtgtgaaattaaatagtttattacgtccaaagatgtagcataaccatcttgtgacctagtaataatataataatagagaactgttttacccattctatcatcataatcagtggtgtagtcgtaatcgtaatcgtctaattcatcatcccaattataatattcaccagcacgtctaatctgttctattttgatcttgtatccatactgtatgttgctacatgtaggtattcctttatccaataatagtttaaacacatctacattgggatttgatgttgtagcgtatttctctacaatattaataccatttttgatactatttatttctatacctttcgaaattagtaatttcaataagtctatatcgatgttatcagaacatagatattcgaatatatcaaaatcattgatatttttatagtcgactgacgacaataacaaaatcacaacatcgtttttgatattattatttttcttggtaacgtatgcctttaatggagtttcaccatcatactcatataatggatttgcaccactttctatcaatgattgtgcactgctggcatcgatgttaaatgttttacaactatcatagagtatcttatcgttaaccatgattggttgttgatgctatcgcattttttggtttctttcatttcagttatgtatggatttagcacgtttgggaagcatgagctcatatgatttcagtactgtagtgtcagtactattagtttcgatcagatcaatgtctagatctatagaatcaaaacacgataggtcagaagataatgaatatctgtacgcttctttttgtactgtaacttctcgttttgttagatgtttgcatcgtgctttaacatcaatggtacaaattttatcctcgctttgtgtatcatattcgtccctactataaaattgtatattcagattatcatgagatgtgtatacgctaacggtatcaataaacggagcacaccatttagtcataaccgtaatccaaaaatttttaaagtatatcttaacgaaagaagttgtatcatcgttaggatttggtaaatcattatctacagtgtatggtactagatcctcataagtgtatatatctagagtaatgtttaatttatcaaatggttgataatatggatcctcatgacaatttccgaagatggaaatgagatatagacatgcaataaatctaatcgaagacatggttactccttaaaaaaatacgaataatcaccttggctatttagtaagtgtcatttaacactatactcatattaatccatggactcataatctctatacgggattaacggatgttctatatacggggatgagtagttctcttctttaactttatactttttactaatcatatttagactgatgtatgggtaatagtgtttgaagagctcgttctcatcatcagaataaatcaatatctctgtttttttgttatacagatgtattacagcctcatatattacgtaatagaacgtgtcatctaccttattaactttcaccgcatagttgtttgcaaatacggttaatcctttgacctcgtcgatttccgaccaatctgggcgtataatgaatctaaactttaatttcttgtaatcattcgaaataatttttagtttgcatccgtagttatcccctttatgtaactgtaaatttctcaacgcgatatctccattaataatgatgtcgaattcgtgctgtatacccatactgaatggatgaacgaataccgacggcgttaatagtaatttactttttcatctttacatattgggtactagttttactatcataagtttataaattccacaagctactatggaataagccaaccatcttagtataacacacatgtcttaaagtttattaattaattacatgttgttttatatatcgctacgaatttaaacagagaaatcagtttaggaaaaaaaattatctatctacatcatcacgtctctgtattctacgatagagtgctactttaagatgagacatatccgtgtcatcaaaaatatactccattaaaatgattattccggcagcgaacttgatattggatatatcacaacctttgttaatatctacgacaatagacagcagtcccatggttccataaacagtgagtttatctttctttgaagagatattttgtagagatcttataaaactgtcgaatgacatcgcatttatatctttagctaaatcgtatatgttaccatcgtaatatctaaccgcgtctatcttaaacgtttccatcgctttaaagacgtttccgatagatggtctcatttcatcagtcatactgagccaacaaatataatcgtgtataacatctttgatagaatcagactctaaagaaaacgaatcggctttattatacgcattcatgataaacttaatgaaaaatgtttttcgttgtttaagttggatgaatagtatgtcttaataattgttattatttcattaattaatatttagtaacgagtacactctataaaaacgagaatgacataactagttatcaaagtgtctaggacgcgtaattttcatatggtatagatcctgtaagcattgtctgtattctggagctattttctctatcgcattagtgagttcagaatatgttataaatttaaatcgaataacgaacataactttagtaaagtcgtctatattaactcttttattttctagccatcgtaataccatgtttaagatagtatattctctagttactacgatctcatcgttgtctagaatatcacatactgaatctacatccaattttagaaattggtctgtgttacatatctcttctatattattgttgatgtattgtcgtagaaaactattacgtagaccattttctttataaaacgaatatatagtactccaattatctttaccgatatatttgcacacataatccattctctcaatcactacatctttaagattttcgttgttaagatatttggctaaactatataattctattagatcatcaacagaatcagtatatatttttctagatccaaagacgaactctttggcgtcctctataatattcccagaaaagatattttcgtgttttagtttatcgagatctgatctgttcatatacgccatgattgtacggtacgttatgataaccgcataaaataaaaatccattttcatttttaaccaatactattcataattgagattgatgtaatactttgttactttgaacgtaaagacagtacacggatccgtatctccaacaagcacgtagtaatcaaatttggtgttgttaaacttcgcaatattcatcaatttagatagaaacttatactcatcatctgttttaggaatccatgtattattaccactttccaacttatcattatcccaggctatgtttcgtccatcatcgttgcgcagagtgaataattcttttgtattcggtagttcaaatatatgatccatgcatagatcggcaaagctattgtagatgtgatttttcctaaatctaatataaaactcgtttactagcaaacactttcctgatttatcgaccaagacacatatggtttctaaatctatcaagtggtggggatccatagttatgacgcagtaacatatattattacattcttgactgtcgctaatatctaaatatttattgttatcgtattggattctgcatatagatggcttgtatgtcaaagatatagaacacataaccaatttatagtcgcgctttacattctcgaatctaaagttaagagatttagaaaacattatatcctcggatgatgttatcactgtttctggagtaggatatattaaagtctttacagatttcgtccgattcaaataaatcactaaataatatcccacattatcatctgttagagtagtatcattaaatctattatattttatgaaagatatatcactgctcacctctatatttcgtacatttttaaactgtttgtataatatctctctgatacaatcagatatatctattgtgtcggtagacgataccgttacatttgaattaatggtgttccattttacaacttttaacaagttgaccaattcatttctaatagtatcaaactctccatgattaaatattttaatagtatccattttatatcactacggacacaaagtagctgacataaaccattgtataatttttatgttttatgtttattagcgtacacattttggaagttccggcttccatgtatttcctggagagcaagtagatgatgaggaaccagatagtttatatccgtacttgcacttaaagtctacattgtcgttgtatgagtatgatcttttaaacccgctagacaagtatccgtttgatattgtaggatgtggacatttaacaatctgacacgtgggtggatcggaccattctcctcctgaacacaggacaccagagttaccaatcaacgaatatccactattgcaactataagttacaacgcttccatcggtataaaaatcctcgtatccgttatgtcttccgttggatatagatggaggggattggcatttaacagattcacaaataggtgcctcgggattccataccatagatccagtagatcctaattcacaatacgatttagattcaccgatcaaatgatatccgctattacaagagtacgttatactagagccaaagtctactccaccaatatcaagttggccattatcgatatctcgaggcgatgggcatctccgtttaatacattgattaaagagtgtccatccagtacctgtacatttagcatatataggtcccattttttgctttctgtatccaggtagacatagatattctatagtgtctcctatgttgtaattagcattagcatcagtctccacactattcttaaatttcatattaatgggtcgtgacggaatagtacagcatgatagaacgcatcctattcccaacaatgtcaggaacgtcacgctctccaccttcatatttatttatccgtaaaaatgttatcctggacatcgtacaaataataaaaagcccatatatgttcgctattgtagaaattgtttttcacagttgctcaaaaacgatggcagtgacttatgagttacgttacactttggagtctcatctttagtaaacatatcataatattcgatattacgagttgacatatcgaacaaattccaagtatttgattttggataatattcgtattttgcatctgctataattaagatataatcaccgcaagaacacacgaacatctttcctacatggttaaagtacatgtacaattctatccatttgtcttccttaactatatatttgtatagataattacgagtctcgtgagtaattccagtaattacatagatgtcgccgtcgtactctacagcataaactatactatgatgtctaggcatgggagacttttttatccaacgatttttagtgaaacattccacatcgtttaatactacatatttttcatacgtggtataaactccacccattacatatatatcatcgtttacgaataccgacgcgcctgaatatctaggagtaattaagtttggaagtcttatccatttcgaagtgccgtgtttcaaatattctgccacacccgttgaaatagaaaattctaatcctcctattacatataactttccatcgttaacacaagtactaacttctgattttaacgacgacatattagtaaccgttttccattttttcgtttcaagatctacccgcgatacggaataaacatgtctattgttaatcatgccgccaataatgtatagacaattatgtaaaacatttgcattatagaattgtctatctgtattaccgactatcgtccaatattctgtcctaggagagtaatgggttattgtggatatataatcagagtttttaatgactactatattatgttttataccatttcgtgtcactggctttgtagatttggatatagttaatcccaacaatgatatagcattgcgcatagtattagtcataaacttgggatgtaaaatgttgatgatatctacatcgtttggatttttatgtatccactttaataatatcatagctgtaacatcctcatgatttacgttaacgtcttcgtgggataagatagttgtcagttcatcctttgataattttccaaattctggatcggatgtcaccgcagtaatattgttgattatttctgacatcgacgcattatatagttttttaattccatatcttttagaaaagttaaacatccttatacaatttgtggaattaatattatgaatcatagtttttacacatagatctactacaggcggaacatcaattattacggcagcaactagtatcatttctacattgtttatggtgatgtttatcttcttccagcgcatatagtctaatagcgattcaaacgcgtgatagtttataccattcaatataatcgcttcatcctttagatggtgatcctgaatgcgtttaaaaaaattatacggagacgccgtaataatttccttattcacttgtataatttccccattgatagaaaatatcacgctttccattcttgaagtactataagtaattatagtataatgtaaaggtttatatattcaatattttttataaaaaaatcatttcgacattaattcctttttaaatttgcgtctatcatctatagaaacatattctatgaatttataaaatgcttttacgtgtcctatcgtaggcgatagaaccgctaaaaagcctatcgaatttctacaaaagaatctgttatatggtatagggagagtataaaacattaaatgtccgtacttattaaagtattcagtagccaatcctaactctttcgaatacttattaatggctcttgttctgtacgaatctatttttttgaacaacggacctagtggtatatcttgttctatgtatctaaaataatgtctgactagatccgttagtttaatatcctcagtcatcttgtctagaatggcaaatctaactgcgggtttaggctttagtttagtttctatatctacatctatgtctttatctaacaccaaaaatataatagctaatattttattacaatcatccggatattcttctacgatctcactaactaatgtttctttggttatactagtatagtcactatcggacaaataaagaaaatcagatgatcgatgaataatacatttaaattcatcatctgtaagatttttgagatgtctcattagaatattattagggttagtactcattatcattcggcagctattacttattttattatttttcaccatatagatcaatcattagatcatcaaaatatgtttcaatcatcctaaagagtatggtgaatgactcttcccatctaatttctgaacgttcaccaatgtctctagccactttggcactaatagcgatcattcgcttagcgtcttctatattattaactggttgattcaatctatctagcaatggaccgtcggacagcgtcattctcatgttcttaatcaatgtacatacatcgccgtcatctaccaattcatccaacaacataagctttttaaaatcatcattataataggtttgatcgttgtcatttctccaaagaatatatctaataagtagagtcctcatgattagttaacaactattttttatgttaaatcaattagtacaccgctatgtttaatacttattcatattttagtttttaggattgagaatcaatacaaaaattaatgcatcattaattttagaaatacttagtttccacgtagttaatgaaacatttgaactcatcgtacaggacgttctcgtacaggacgtaactataaaccggtttatatttgttcaagatagatacaaatccgataactttttttacgaattctacgggatccactttaaaagtgtcatacggggttctttttatttttttaaacagatcaatggtgtgatgttgattaggtcttttacgaatttgatatagaatagcgtttacatattctccataatggtcaatcgccatttgttcgtatgtcataaattctttaattatatgacactgtgtattgtttagttcatccttgttcattgttaggaatctattcaaaatggcaattatactagaactataggtgcgttgtatacacatattgatgtgtctgtttatacaatccatgatatttggatccatgctactaccttcgggtaaaattgtagcatcatataccatttctagtactttaggttcattgttatccattgcagaggacgtcatgatcgaatcataaaaaaatatattatttttatgttattttgttaaaaataatcatcgaatacttcgtaagatactccttcatgaacataatcagttacaaaacgtttatatgaagtaaagtatctacgatttttacaaaagtccggatgcataagtacaaagtacgcgataaacggaataataatagatttatctagtttatctttttctatagctttcatagttagatacatggtctcagaagtaggattatgtaacatcagcttcgataaaatgactgggttatttagtcttacacattcgctcatacatgtatgaccgttaactacagagtctacactaaaatgattgaacaatagatagtctaccattgtttcgtattcagatagtacagcgtagtacatagcatcttcacaaattatatcattgtctaatagatatttgacgcatcttatggatcccacttcaacagccatcttaaaatcggtagaatcatattgctttcctttatcattaataatttctagaacatcatctctatcataaaagatacaaatattaactgtttgatccgtaataacattgctagtcgatagcaatttgttaataagatgcgctgggctcaatgtcttaataagaagtgtaagaggactatctccgaatttgttttgtttattaacatccgttgatggaagtaaaagatctataatgtctacattcttgactgttttagagcatacaatatggagaggtgtatttccatcatgatctggttttgagggactaattcctagtttcatcatccatgagattgtagaagcttttggattgtctgacataagatgtctatgaatatgatttttgccaaatttatccactatcctggcttcgaatccgatggacattatttttttaaacactctttctgaaggatctgtacacgccaacaacggaccacatccttcttcatcaaccgagttgttaatcttggctccatactgtaccaataaatttattctctctatgacttcatcatctgttcccgagagataatatagaggtgttttattatgtttatcacacgcgtttggatctgcgccgtgcgtcagcagcatcgcgactattctattattattaattttagaagctatatgcaatggataatttccatcatcatccgtctcatttggagagtatcctctatgaagaagttcttcgacaaatcgttcatctagtcctttaattccacaatacgcatgtagaatgtgataattatttccagaaggttcgatagcttgtagcatattcctaaatacatctaaatttttactattatatttggcataaagagatagataatactcggccgacataatgttgtccattgtagtataaaaattaatatttctatttctatttctgtatatttgcaacaatttactctctataacaaatatcataacttagttcttttatgtcaagaaggcactggtttagttcatctataaatgtcacgccataactaccacgcatgccatactcagaattatgataaagatatttatccttggggtgtaggtaatggggattaatctttgttggatcagtctctaagttaacacatgtcacacatgatccatttatagttatatcacacgatgatgatttatgaattgattccggaagatcgctatcgtattttgtggttccacaattcatttccatacatgttattgtcacactaatattatgatgaactttatctagccgctgagtggtaaacaacagaacagatagtttattatctttaccaacaccctcagccgctgccacaaatctctgatccgtatccatgatggtcatgtttatttctagtccgtatccagtcaacactatgttagcatttctgtcgatatagctttcactcatatgacactcaccaataatagtagaattaatgtcgtaatttacaccaatagtgagttcggcggcaaagtaccaataccggtaatcttgtcgaggaggacatatagtattcttgtattctaccgaatacccgagagatgcgatacaaaagagcaagactaatttgtaaaccatcttactcaaaatatgtaacaatagtacgatgcaatgagtaagacaataggaaatctatcttatatacacataattattctatcaattttaccaattagttagtgtaatgttaacaaaaatgtgggagaatctaattagtttttctttacacaattgacgtacatgagtctgagttccttgtttttgctaattatttcatccaatttattattcttgacgatatcgagatcttttgtataggagtcagacttgtattcaacatgcttttctataatcatcttagttatttcggcatcatccaatagtacattttccagattaacagagtagatattaatgtcgtatttgaacagagcctgtaacatctcaatgtctttattatctatagccaatttaatgtccggaatgaagagaagggaattattggtgtttgtcgacgtcatatagtcgagcaagagaatcatcatatccacgtgtccattttttatagtggtgtgaatacaactaaggagaatagccagatcaaaagtagatggtatttctgaaagaaagtatgatacaatacttacatcattaagcatgacggcatgataaaatgaagttttccatccagttttcccatagaacatcagtctccaatttttcttaacaaacagtttcaccgtttgcatgttaccactatcaaccgcataatacaatgcggtgtttcctttgtcatcaaattgtgaatcatccattccactgaatagcaaaatctttactattttggtatcttctaatgtggctgcctgatgtaatggaaattcattctctagaagatttttcaatgctccagcgttcaacaacgtacatactagacgcacgttattatcagctattgcataatacaaggcactatgtccatggacatccgccttaaatgtatctttactagagagaaagcttttcagctgcttagacttccaagtattaattcgtgacagatccatgtctgaaacgagacgctaattagtgtatattttttcattttttataattttgtcatattgcaccagaattaataatatctctaatagatctgattagtagatacatggctatcgcaaaacaacatatacacatttaataaaaataatatttattaagaaaattcagatttcacgtacccatcaatataaataaaataatgattccttccaccgtatccataaacaatattaaggagattctaccttacccataaacaatataaatccagtaatatcatgtctaatgatgaacacaaatggtgtattaaattccagtttttcaggagatgatctcgccgtagctaccatgatagtagatgcctctgctacagttccttgttcgtcgacatctatctttgcattctgaaacattttataaatatataatgggtccctagtcatatgtttaaacgacgcattatctggattaaacatactaggagccatcatttcggctatcgacttaatatccctcttattttcgatagaaaatttagggagtttaagattgtacactttattccctaattgaaacgaccaatagtctaattttgcagccgtaatagaatctgtgaaatgggtcatattatcacctattgccaggtacatactaatattagcatccttatacggaaggcgcaccatatcatattcttcgtcatcgattgtgattgtatttccttgcaatttagtaactacgttcatcatgggaaccgttttcgtaccgtacttattagtaaaactagcattgcgtgttttagtgatatcaaacggatattgccatgtacctttaaaatatatagtattaatgattgcccatagagtattattgtcgagcatattagaatctactacattagacataccggatctacgttctactatagaattaattttattaaccgcatctcgtctaaagtttaatctatataggccgaatctatgatattgttgataatacaacggtttaatgcacacagtattatctacgaaactttgataagttagatcagtgtacgtatatttagatgttttcagcttagctaatcctgatattaattctgtaaatgctggacccagatctctttttctcaaatccatagtcttcaataattctattctagtattacctgatgcaggcaatagcgacataaacatagaaaacgaataaccaaacggtgagaagacaatattatcatcttgaatatttttatacgctactataccggcattggtaaatccttgcagacgataggtagacactgaacacgttaacgatagtatcaataacgcaatcatgattttatggtattaataattaaccttatttttatgttcggtataaaaattattgatgtctacacatccttttgtaattgacatctatatatccttttgtataatcaactctaatcactttaacttttacagttttccctaccagtttatccctatattcaacatatctatccatatgcatcttaacactctctgccaagatagcttcagagtgaggatagtcaaaaagataaatgtatagagcataatccttctcgtatactctgccctttattacatcgcccgcattgggcaacgaataacaaaatgcaagcatcttgttaacgggctcgtaaattgggataaaaattatgtttttatatctattttattcaagagaatattcaggaatttctttttccggttgtatctcatcgcagtatatatcatttgtacattgtttcatattttttaatagtttacaccttttagtaggactagtatcgtacaattcatagctgtattttgaattccaatcacgcataaaaatatcttccaattgttgacgaagacctaatccatcatccggtgtaatattaatagatgctccacatgtatccgtaaagtaatttcctgtccaatttgaggtacctatataggccgttttatcggttaccatatatttggcatggtttaccctagaatacggaatgggaggatcagcatctggtacaataaatagctttacttctatatctatgtttttagattttagcatagcgatagatcttaaaaagtttctcatgataaacgaagatcgttgccagcaactaatcaatagcttaacggatacttgtctgtctatagcggatcttcttaattcatcttctatataaggccaaaacaaaattttacccgccttcgaataaataatagggataaagttcataacagatacataaacgaatttactcgcatttctaatacatgacaataaagcggttaaatcattggttctttccatagtacatagttgttgcggtgcagaagcaataaatacagagtgtggaacaccacttacgttaatactaagaggatgatctgtattataatacgacggataaaagtttttccaattatatggtagattgttaactccaagataccagtatacctcaaaaatttgagtgagatccgctgccaagttcctattattgaagatcgcaatacccaattctttgacctgagttagtgatctccaatccatgttagcgcttcctaaataaatatgtgtattatcagatatccaaaattttgtatgaagaactcctcctaggatatttgtaatatctatgtatcgtacttcaactccggccatttgtagtctttcaacatcctttaatggtttgttagatttattgacggctactctaactcgtactcctcttttgggtaattgtacaatctcgtttaatattatcgtgccgaaattcgtacccacttcatccgataaactccaataaaaagatgatatatctagtgtttttgtggtattggatagaatttccctccacatgttaaatgtagacaaatatactttatcaaattgcatacctataggaatagtctctgtaatcactgcgattgtattatccggattcattttatttgttaaaagaataatcctatatcacttcactctattaaaaatccaagtttctatttctttcatgactgattttttaacttcatccgtttccttatgaagatgatgtttggcaccttcataaatttttatttctctattacaatttgcatgttgcatgaaataatatgcacctgaaacatcactaatctcattgtttgttccctggagtatgagagtcggggggtgttaatcttggaaattatttttctaaccttgttggtagccttcaagacctgactagcaaatccagccttaattttttcatgattgattaatgggtcgtattggtatttataaactttatccatatctctagatactgattctggacatagctttccgactggcgcatttggtgtgatggttcccataagtttggcagctagcagattcagtcttgaaacagcatctgcattaactagaggagacattagaatcattgctgtaaacaagtttggattatcgtaagaggctagtatagaaattgttgctcccatggaatgacccaataagtagatttaatagttaccacgtgctgtaccaaagtcatcaatcatcattttttcaccattacttcttccatgtccaatatgatcatgtgagaatactaaaattcctaacgatgatatgttttcagctagttcgtcataacgtccagaatgtttaccagctccatgacttatgaatactaatgccttaggatatgtaataggtttccaatatatgtaatcattgtccagattgaacatacagtttgcactcatgattcacgttatataactatcaatattaacagttcgtttgatgatcatattatttttatgttttattgataattgtaaaaacatacaattaaatcaatatagaggaaggagacggatactgtcttttgtgagatagtcatggcgactaaattagattatgaggatgctgttttttactttgtggatgatgataaaatatgtagtcgcgactccatcatcgatctaatagatgaatatattacgtggagaaatcatgttatagtgtttaacaaagatattaccagttgtggaagactgtacaaggaattgatgaagttcgatgatgtcgctatacggtactatggtattgataaaattaatgagattgtcgaagctatgagcgaaggagaccactacatcaattttacaaaagtccatgatcaggaaagtttattcgctaccataggaatatgtgctaaaatcactgaacattggggatacaaaaagatttcagaatctagattccaatcattgggaaacattacagatctgatgaccgacgataatataaacatcttgatactttttctagaaaaaaaattgaattgatgatataggggtcttcataacgcataattattacgttagcattctatatccgtgttaaaaaaaattatcctatcatgtatttgagagttttatatgtagcaaacatgatagctgtgatgccaataagctttagatattcacgcgtgctagtgttagggatggtattatctggtggtgaaatgtccgttatataatctacaaaacaatcatcgcatatagtatgcgatagtagagtaaacatttttatagtttttactggattcatacatcgtctacccaattcggttataaatgaaattgtcgccaatcttacacccaaccccttgttatccattagtatagtattaacttcgttatttatgtcataaactgtaaatgattttgtagatgccatatcatacatgatattcatgtccctattataatcattactaactttatcacaatatatgttgataatatctatatatgatctagtctttgtgggcaactgtctatacaagtcgtctaaacgttgtttactcatatagtatcgaacagccatcattacatggtcccgttccgttgatagataatcgagtatgttagtggacttgtcaaatctatataccatattttctggaagtggatatacatagtcgtgatcaacattattgctagcctcatcttctatatcctgtactataccattatctatatcatctacataatctacgatattattacacataaacatcgacaacatactattgtttattatctaagtcctgttgatccaaacccttgatctcctctatttgtactatctagagattgtacttcttccagttctggataatatatacgttgatagattagctgagctattctatctccagtatttacattaaacgtacattttccattattaataagaatgactcctatgtttcccctataatcttcgtctattacaccacctcctatatcaatgccttttagtgacagaccagacctaggagctattctaccatagcaaatcttaggcatggacatactaatatctgtcttaattaactgtctttctcctggagggatagtataatcgtaagcgctatacaaatcatatccggcagcacccggcgattgcctagtaggagatttagctctgttagtttccttaacaaatctaactggtgagttaatattcatgttgaacataaaactaatattttatttcaaaattatttaccatcccatatattccatgaataagtgtgatgattgtacacttctatagtatctatatacgatccacgataaaatcctcctatcaatagcagtttattatccactatgatcaattctggattatccctcggataaataggatcatctatcagagtccatgtattgctggattcacaataaaattccgcatttctaccaaccaagaataaccttctaccgaacactaacgcgcatgatttataatgaggataataagtggatggtccaaactgccactgatcatgattgggtagcaaatattctgtagttgtatcagtttcagaatgtcctcccattacgtatataacattgtttatggatgccactgctggattacatctaggtttcagaagactcggcatattaacccaagcagcatccccgtggaaccaacgctcaacagatgtgggatttggtagacctcctactacgtataatttattgttagcgggtatccccgtagcatacagtctggggctattcatcggaggaattggaatccaattgtttgatatataatttacagctatagcattgttatgtatttcattgttcatccatccaccgatgagatatactacttctccaacatgagtacttgtacacatatggaatatatctataatttgatccatgttcataggatactctatgaatggatacttgtatgatttgcgtggttgtttatcacaatgaaatattttggtacagtctagtatccattttacattatttatacctctgggagaaagataatttgacctgattacatttttgataaggagtagcagatttcctaatttatttcttcgctttatataccacttaatgacaaaatcaactacataatcctcatctggaacatttagttcatcgctttctagaataagtttcatagatagataatcaaaattgtctatgatgtcatcttccagttccaaaaagtgtttggcaataaagtttttagtatgacataagagattggatagtccgtattctatacccatcatgtaacactcgacacaatattcctttctaaaatctcgtaagataaagtttatacaagtgtagatgataaattctacagaggttaatatagaagcacgtaataaattgacgacgttatgactatctatatatacctttccagtatacgagtaaataactatagaagttaaactgtgaatgtcaaggtctagacaaacccttgtaactggatctttatttttcgtgtatttttgacgtaaatgtgtgcgaaagtaaggagataactttttcaatatcgtagaattgactattatattgccacctatagcatcaataattgttttgaatttcttagtcatagacaatgctaatatattcttacagtacacagtattgacaaatatcggcatttatgtttctttaaaagtcaacatctaaagaaaaatgattatcttcttgagacataactcccattttttggtattcacccacacgtttttcgaaaaaattagtttttccttccaatgatatattttccatgaaatcaaacggattggtaacattataaatttttttaaatcccaattcagaaatcaatctatccgcgacaaattctatatatgttttcatcatttcacaattcattcctataagtttaactggaagagccgcagtaagaaattcttgttcaatggatactgcatctgttataatagatctaacggtttcttcactcggtggatacaataaatgtttaaacatcaaacatgcgaagtcgcagtgcagaccctcgtctctactaattagttcgttggaaaacgtgagtccgggcattaggccacgctttttaagccaaaatatggaagcgaatgatccggaaaagaagattccttctactgcagcaaaggcaataagtctctctccataaccggcgctgtcatgtatccacttttgagcccaatcggccttcttttttacacaaggcattgtttctatggcattaaagagatagtttttttcattactatctttaacataagtatcgatcaaaagactatacatttccgaatgaatgttttcaatggccatctgaaatccgtagaaacatctagcctcggtaatctgtacttctgtacaaaatcgttccgccaaattttcattcactattccgtcactggctgcaaaaaacgccaatacatgttttataaaatatttttcgtctggtgttagtttattccaatcattgatatctttagatatatctacttcttccactgtccaaaatgatgcctctgcctttttatacatgttccagatgtcataatattggattgggaaaataacaaatctatttggatttggtgcaaggatgggttccataactaaattaacaatatcaataaattttttttcagttatctatatgcctgtacttggattttttgtacatcgatatcgccgcaatcactacaataattacaagtattattgatagcattgttattagtactatcataattaaattatcgacattcatgggtgctgaataatcgttattatcatcattatcattttgtaattgtgacatcatactagataaatcgtttgcgagattgttgtgggaagcgggcatggaggatgcattatcattattatttaacgccttccattcggattcacaaatatggcgcgcgttcaacattttatggaaactataattttgtgaaaacagataacaagaaaactcgtcatcgttcaaatttttaacgatagtaaaccgattaaacgtcgagctaatttctaacgctagcgactctgttggatatgggtttccagatatatatcttttcagttcccctacgtatctataatcatctgtaggaaatggaagatatttccatttatctactgttcctaatatcatatgtggtggtgtagtagaaccattaagcgcgaaagatgttatttcgcatcgtattttaacttcgcaataatttctggttagataacgcactctaccagtcaagtcaatgatattagcctttacagatatattcatagtagtcgtaacgatgactccatcttttagatgcgatactcctttgtatgtaccagaatcttcgtacctcaaactcgatatatttaaacaagttaatgagatattaacgcgttttatgaatgatgatatataaccagaagttttatcctcggtggctagcgctataaccttatcattataataccaactagtgtgattaatatgtgacacgtcagtgtgggtacaaatatgtacattatcgtctacgtcgtattcgatacatccgcatacagccaacaaatataaaatgacaaatactctaacgacgttcgtacccatcttgatgcggtttaataaatgttttgatttcaatttattgtaaaaaaagattcggttttatactgttcgatattctcattgcttatattttcatctatcatctccacacagtcaaatccgtggttagcatgcacctcatcaaccggtaaaagactatcggactcttctatcattataactctagaatatttaatttggtcattattaatcaagtcaattatcttatttttaacaaacgtgagtattttactcattttttataaaaacttttagaaatatacagactctatcgtgtgtctatatcttctttttatatccaatgtatttatgtctgatttttcttcatttatcatatataatggtccaaattctacacgtgcttcggattcatccagatcattaaggttcttataattgtaacatccttctcttccctcttctacatcttccttcttattcttattcttattcttattcttattcttattcttattcttattcttagcgtcacagaatctaccacagcagaatcccatgacgagcgtcatattaaactaattcattttcaattataatatacgattagtaatgaccattaaaataaaaaatattcttcataaccggcaagaaagtgaaaagttcacattgaaactatgtcagtagtatacatcatgaaatgatgatatatatattctctattttggtggaggattatatgatataattcgtggataatcattcttaagacacatttcttcattcgtaaatcttttcacgttaaatgagtgtccatattttgcaatttcttcatatgatggcggtgtacgtggacgaggctgctcctgttcttgttgtggtcgccgactatcgtgtttgcgtttagatccctccattatcgcgattgcgtagatggagtactattttataccttgtaattaaatttttttattaattaaacgtataaaaacgttccgtatctgtatttaagagccagatttcgtctaatagaacaaatagctacagtaaaaataactagaataattgctacacccactagaaaccacggatcgtaatacggcaatcggttttcgataataggtggaacgtatattttatttaaggacttaacaattgtctgtaaaccacaatttgcttcagcggatcctgtattaactatctgtaaaagcatatgttgaccgggcggagccgaacattctccgatatctaatttctgtatatctataatattattaacctccgcatacgcattacagttcttttctagcttggataccgcactaggtacatcgtctagatctattcctatttcctcagcgatagctcttctatccttttccggaagcaatgaaatcacttcaataaatgattcaaccatgagtgtgaaactaagtctagaattactcatgcatttgttagttattcggagcgcgcaatttttaaactgtcctataacctctcctatatgaatagcacaagtgacattagtagggatagaatgttgagctaatttttgtaaataactatctataaaaagattatacaaagttttaaactctttagtttccgccatttatccagtctgagaaaatgtctctcataataaatttttccaagaaactaattgggtgaagaatggaaacctttaatctatatttatcacagtctgttttggtacacatgatgaattcttccaatgccgtactaaattcgatatctttttcgatttctggatatgtttttaataaagtatgaacaaagaaatggaaatcgtaataccagttatgtttaactttgaaattgttttttattttcttgttaatgattccagccacttgggaaaagtcaaagtcgtttaatgccgatttaatacgttcattaaaaacaaactttttatcctttagatgaattattattggttcattggaatcaaaaagtaagatattatcgggtttaagatctgcgtgtaaaaagttgtcgcagcatggtagttcgtagattttaatgtataacagagccatctgtaaaaagataaactttatgtattgtaccaaagatttaaatcctaatttgatagctaactcggtatctactttatctgccgaatacagtgctaggggaaaaattataatgtttcctctttcatattcgtagttagttctcttttcatgttcgaaaaagtgaaacatgcggttaaaatagtttataacattaatattactgttaataactgccgggtaaaagtgggatagtaatttcacgaatttgatactgtcctttctctcgttaaacgcctttagaaaaactttagaagaatatctcaatgagagttcctgaccatccatagtttgtatcaataatagcaacatatgaagaacacgtttatacagagtatgtaaaaatgttaatttatagtttaatcccatggcccacgcacacacgattaattttttttcatctccctttagattgttgtatagaaatttgggtactgtgaactccgccgtagtttccatgggactatataattttgtggcctcgaatacaaattttactacatagttatctatcttaaaaactataccatatcctcctgtagatatgtgataaaaatcgtcgtttataggataaaatcgtttatccttttgttggaaaaatgatgaattaatgtaatcattctcttctatctttagtagtgtttccctattaaaattcttaaaataatttaacaatctaactgacggagcccaattttggtgtaaatctaattgggacattatgttgttaaaatataaacagtctcctaatataacagtatctgataatctatggggagacatccattgatattcaggggatgaatcattggcaacacccatttattgtacaaaaagccccaatttacaaacgaaagtccaggtttgatagagacaaactattaactattttgtctctgtttttaacacctccacagtttttaatttctttggtaatgaaattattcacaatatcagtatcttctttatctaccagagattttactaacttgataaccttggctgtctcattcaatagggtagtaatatttgtatgtgtgatattgatatctttttgaattgtttcttttagaagtgattctttgatggtgtcagcatacgaattacaataatgcagaaactcggttaacatgcaggaattatagtaagccaattccaattgttgcctgtgttgtattagagtgtcaatatgagcaatggtgtccttgcgtttctctgatagaatgcgagcagcgattttggcgttatcatttgacgatatttctggaatgacgaatcctgtttctactaactttttggtaggacaaagtgaaacaatcaagaagatagcttctcctcctatttgtggaagaaattgaactcctctagatgatctactgacgatagtatctccttgacagatattggaccgaattacagaagtacctggaatgtaaagccctgaaaccccctcattttttaagcagattgttgccgtaaatcctgcactgtgaccaagatagagagctcctttggtgaatccatctctatgtttcagtttaaccaagaaacagtcagctggtctaaaatttccatctctatctaatacagcatctaacttgatgtcaggaactatgaccggtttaatgttatatgtaacattgagtaaatccttaagttcataatcatcactgtcatcagttatgtacgatccaaacaatgtttctaccggcatagtggatacgaagatgctatccatcagaatgtttccctgattagtattttctatatagctattcttctttaaacgattttccaaatcagtaactatgttcatttttttaggagtaggacgcctagccagtatggaagaggattttctagatcctctcttcaacatctttgatctcaatggaatgcaaaaccccatagtgaaacaaccaacgataaaaataatattgtttttcactttttataattttaccatctgactcatggattcattaatatctttataagagctactaacgtataattctttataactgaactgagatatatacaccggatctatggtttccataattgagtaaatgaatgctcggcaataactaatggcaaatgtatagaacaacgaaattatactagagttgttaaagttaatattttctatgagctgttccaataaattatttgttgtgactgcgttcaagtcataaatcatcttgatactatccagtaaaccgtttttaagttctggaatattattatcccattgtaaagcccctaattcgactatcgaatatcctgctctgatagcagtttcaatatcgacggacgtcaatactgtaataaaggtggtagtattgtcatcatcgtgataaactactggaatatggtcgttagtaggtacggtaactttacacaacgcgatatataactttccttttgtaccatttttaacgtagttgggacgtcctgcagggtattgttttgaagaaatgatatcgagaacagatttgatacgatatttgttggattcctgattatttactataatataatctagacagatagatgattcgataaatagagaaggtatatcgttggtaggataatacatccccattccagtattctcggatactctattaatgacactagttaagaacatgtcttctattctagaaaacgaaaacatcctacatggactcattaaaacttctaacgctcctgattgtgtctcgaatgcctcgtacaaggatttcaaggatgccatagattctttgaccaacgatttagaattgcgtttagcatctgatttttttattaaatcgaatggtcggctctctggtttgctaccccaatgataacaatagtcttgtaaagataaaccgcaagaaaatttatacgcatccatccaaataaccctagcaccatcggatgatattaatgtattattatagattttccatccacaattattgggccagtatactgttagcaacggtatatcgaatagattactcatgtaacctactagaatgatagttcgtgtactagtcataatatctttaatccaatctaagaaatttaaaattagattttttacactgttaaagttaacaaaggtattacccgggtacgtggatatcatatatggtattggtccattatcagtaatagctccataaactgatacggcgatggtttttatatgtgtttgatctaacgaggaagaaattcgcacccacaattcatctctagatatgtatttaatatcaaacggtaacacatcaatttcgggacgcgtatatgtttctaaatttttaatccaaatataatgatgacctatatgccctattatcatactgtcaactatagtacacctagagaacttacgatacatctgtttcctataatcgttaaattttacaaatctataacatgctaaaccttttgacgacaaccattcattaatttctgatatggaatctgtattctcgataccgtattgttctaaagccagtgctatatctccctgttcgtgggaacgctttcgtataatatcgatcaacggataatctgaagtttttggagaataatatgactcatgatctatttcgtccataaacaatctagacataggaattggaggcgatgatcttaattttgtgcaatgagtcgtcaatcctataacttctaatcttgtaatattcatcatcgacataatactatctatgttatcatcgtatattagtataccatgaccttcttcatttcgtgccaaaatgatatacagtcttaaatagttacgcaatatctcaatagtttcataattgttagctgttttcatcaagatttgtaccctgtttaacatgatggcgttctatacgtttctattttctattttttaaatttttaaatttttaacgatttactgtggctagatacccaatctctctcaaatatttttttagcctcgcttacaagctgtttatctatactattaaaactgacgaatccgtgattttggtaatgggttccgtcgaaatttgccgaagtgatatgaacatattcgtcgtcgactatcaacaattttgtattattctgaatagtgaaaaccttcacagatagatcattttgaacacacaacgcgtctagacttctggcggttgccatagaatatacgtcgttcttatcccaattaccaactagaagtctgatcttaactcctctattaatggctgcttctataatggagttgtaaatatcgggccaatagtagctattaccgtcgacacgtgtagtgggaactatggccaaatgttcaatatctatactagtcttagctgacctgagtttatcaataactacatcggtatctagatctctagaatatcccaataggtgttccggagaatcagtaaagaacactccacctataggattcttaatatgatacgcagtgctaactggcagacaacaagccgcagagcataaattcaaccatgaattttttgcgctattaaaggctttaaaagtatcaaatcttctacgaagatctgtggccagcgggggataatcagaatatacacctaacgttttaatcgtatgtatagatcctccagtaaatgacgcgtttcctacataacatctttcatcatctgacacccaaaaacaaccgagtagtagtcccacattattttttttatctatattaacggttataaaatttatatccgggcagtgactttgtagctctcccagatttcttttccctcgttcatctagcaaaactattattttaatccctttttcagatgcctcttttagtttatcaaaaataagcgctcccctagtcgtactcagaggattacaacaaaaagatgctatgtatatatatttcttagctagagtgataatttcgttaaaacattcaaatgttgttaaatgatcggatctaaaatccatattttctggtagtgtttctaccagcctacattttgctcccgcaggtaccgatgcaaatggccacatttagttaacataaaaacttatacatcctgttctatcaacgattctagaatatcatcggctatatcgctaaaattttcatcaaagtcgacatcacaacctaactcagtcaatatattaagaagttccatgatgtcatcttcgtctatttctatatccgtatccattgtagattgttgaccgattatcgagtttaaatcattactaatactcaatccttcagaatacaatctgtatttcattgtaaatttataggcggtgtatttaagttggtagattttcaattatgtatcaatatagcaacagtagttcttgctcctccttgattctagcatcctcttcattattttcttctacgtacataaacatgtccaatacgttagacaacacaccgacgatggcggccgccacagacacgaatatgactagaccgatgaccatttaaaaacccctctctagctttcacttaaactgtatcgatcattcttttagcacatgtataatataaaaaaacattattctatttcgaatttaggcttccaaaaatttttcatccgtaaaccgataataatatatatagacttgttaatagtcggaataaatagattaatgcttaaactatcatcatctccacgattagagatacaatatttacattctttttgctgtttcgaaactttatcaatacacgttaatacaaacccaggaaggagatattgaaactgaggctgttgaaaatgaaacggtgaatacaataattcagataatgtaaaatcatgattccgtattctgatgatattagaactgctaatggatgtcgatggtatgtatctaggagtatctattttaacaaagcatcgatttgctaatatacaattatcattttgattaattgttattttattcatattcttaaaaggtttcatatttatcaattcttctacattaaaaatttccatttttaatttatgtagccccgcaatactcctcattacgtttcattttttgtctataatatccattttgttcatctcggtacatagattatccaattgagaagcgcatttagtagttttgtacattttaagtttattgacgaatcgtcgaaaactagttatagttaacattttattatttgataccctgatattaatacccctgccgttactattatttataactgatgtaacccacgtaacattggaattaactatcgatagtaatgcatcgacgcttccaaaattgtctattataaactcaccgataatttttttattacatgttttcatattcattaggattatcaaatctttaatcttactacgattgtatgcgttgatattacaagacgtcattctaaaagacggaggatttccatcaaatgccagacaatcacgtacaaagtacatggaaataggttttgttctattgcgcatcatagattcatatagaacacccgtagaaatactaatttgttttactctataaaatactaatgcatctatttcatcgttttgtataacgtctttccaagtgtcaaattccaaatttttttcattgatagtaccaaattcttctatctctttaactacttgcatagataggtaattacagtgatgcctacatgccgttttttgaaactgaatagatgcgtctagaagcgatcgtacgctagtcacaatcaccactttcatatttagaatatatgtatgtaaaaatatagtagaatttcattttgtttttttctatgctataaatgaattctcattttgcatctgctcatactccgttttatatcaataccaaagaaggaagatatctggttctaaaagccgttaaagtatgcgatgttagaactgtagaatgcgaaggaagtaaagcttcctgcgtactcaaagtagataaaccctcatcacccgcgtgtgagagaagaccttcgtccccgtccagatgcgagagaatgaataaccctggaaaacaagtcccgtttatgaggacggacatgctacaaaatatgttcgcggctaatcgcgataatgtagcttctagacttttgaactaaaatacaattatatctttttcgatattaataaatccgtgtcgtccaggttttttatctctttcagtatgtgaatagataggtattttatctctattcatcatcgaatttaagagatccgataaacattgtttgtattctccagatgtcagcatctgatacaacaatatatgtgcacataaacctctggcacttatttcatgtaccttccccttatcactaaggagaatagtatttgagaaatatgtatacatgatattatcatgaattagatatacagaatttgtaacactctcgaaatcacacgatgtgtcggcgttaagatctaatatatcactcgataacacattttcatctagatacactagacattttttaaagctaaaatagtctttagtagtgacagtaactatgcgattattttcatcgatgatacatttcatcggcatattattacgcttaccatcaaagactataccatgtgtatatctaacgtattctagcatagttgccatacgtgcattaaacttttcaggatctttggatagatcttccaatctatctatttgagaaaacatttttatcatgttcaatagttgaaacgtcggatccactatatagatattatctataaagattttaggaactacgttcatggtatcctggcgaatattaaaactatcaatgatatgattatcgttttcatcttttatcaccatatagtttctaagatatgggattttacttaatataatattatttcccgtaataaattttattagaaatgccaaatctataagaaaagtcctcgaattagtttgaagaatatctatatcgccgtaccgtatatttggattaattagatatagagaatatgatccgtaacatatacaacttttattatggcgtctaagatattcttccatcaacttattaacatttttgactagggaagatacattatgacgtcccattacttttgccttgtctattattgcgacgttcatagaatttagcatatctcttgccaattcttccattgatgttacattataagaaattttagatgaaattacatttggagctttaatagtaagaactcctaatatgtccgtgtatgtggtcactaatacagattgtagttctataatcgtaaataatttacctatattatatgtttgagtctgtttagaaaagtagctaagtatacgatcttttatttctgatgcagatgtatcaacatcggaaaaaaatctttttttattcttttttactaaagatacaaatatgtctttgttaaaaacagttattttttgaatatttctagcttgtaattttaacatatgatattcattcacactaggtactctgcctaaataggtttctataatctttaatgtaatattaggaaaagtattctgatcaggattcctattcattttgaggatttaaaactctgattattgtctaatatggtctctacgcaaactttttcacagagcgatagagtttttgataactcgtttttcttaagaaatataaaactactgtctccagagctcgctctatcttttattttatttaattcgatacaaactcctgatactggttcagaaagtaattcattaattttcagtcctttatagaagatatttaatatagataatacaaaatcttcagtttttgatatcgatctgattgatcctagaactagatatattaataacgtgctcattaggcagtttatggcagcttgataattagatatagtatattccagttcatatttattagataccgcattgcccagattttgatattctatgaattcctctgaaaataaatccaaaataactaaacattctattttttgtggattagtgtactctcttccctctatcatgttcactactggtgtccacgatgataaatatctagagggaatataatatagtccataggatgccaatctagcaatgtcgaataactgtaatttgattcttcgttcttcattatgaattgattcttgaggtataaacctaacacaaattatattattagacttttcgtatgtaatgtctttcatgttataagtttttaatcctggaatagaatctattttaatgaggcttttaaacgcagagttctccaacgagtcaaagcataatactctgttgtttttcttatatacgatgttacgattttcttctttgaatggaataggtttttgaattagtttataattacaacataatagataaggaagtgtgcaaatagtacgcggaaaaaacataatagctcccctgttttcatccatggttttaagtaaatgatcactggcttctttagttaatggatattcgaacattaaccgtttcatcatcattggacagaatccatatttcttaatgtaaagagtgatcaaatcattgtgtttattgtaccatcttgttgtaaatgtgtattcggttatcggatctgctcctttttctattaaagtatcgatgtcgatctcgtctaagaattcaactatatcgacatatttcatttgtatacacataaccattactaacgtagaatgtataggaagagatgtaacgggaacagggtttgttgattcgcaaactattctaatacataattcttctgttaatacgtcttgcacgtaatctattatagatgccaagatatctatataattattttgtaagatgatgttaactatgtgatctatataagtagtgtaataattcatgtatttcgatatatgttccaactctgtctttgtgatgtctagtttcgtaatatctatagcatcctcaaaaaatatattcgcatatattcccaagtcttcagttctatcttctaaaaaatcttcaacgtatggaatataataatctattttacctcttctgatatcattaatgatatagtttttgacactatcttctgtcaattgattcttattcactatatctaagaaacggatagcgtccctaggacgaactactgccattaatatctctattatagcttctggacataattcatctattataccagaattaatgggaactattccgtatctatctaacatagttttaagaaagtcagaatctaagacctgatgttcatatattggttcatacatgaaatgatctctattgatgatagtgactatttcattctctgaaaattggtaactcattctatatatgctttccttgttgatgaaggatagaatatactcaatagaatttgtaccaacaaactgttctcttatgaatcgtatatcatcatctgaaataatcatgtaaggcatacatttaacaattagagacttgtctcctgttatcaatatactattcttgtgataatttatgtgtgaggcaaatttgtccacgttctttaattttgttatagtagatatcaaatccaatggagctacagttcttggcttaaacagatatagtttttctggaacaaattctacaacattattataaaggactttgggtagataagtgggatgaaatcctattttaattaatgctatcgcattgtcctcgtgcaaatatccaaacgcttttgtgatagtatggcattcattgtctagaaacgctctacgaatatctgtgacagatatcatctttagagaatatactagtcgcgttaatagtactacaatttgtattttttaatctatctcaataaaaaaattaatatgtatgattcaatgtataactaaactactaactgttattgataactagaatcagaatctaatgatgacgtaaccaagaagtttatctactgccaatttagctgcattatttttagcatctcgtttagattttccatctgccttatcgaatactcttccgtcgatgtctacacaggcataaaatgtaggagagttactaggcccaactgattcaatacgaaaagaccaatctctcttagttatttggcagtactcattaataatggtgacagggttagcatctttccaatcaataatttttttagccggaataacatcatcaaaagacttatgatcctctctcattgatttttcgcgggatacatcatctattatgacgtcagccatagcatcagcatccggcttatccgcctccgttgtcataaaccaacgaggaggaatatcgtcggagctgtacaccatagcactacgttgaagatcgtacagagctttattaacttctcgcttctccatattaagttgtctagttagttgtgcagcagtagctccttcgattccaatgtttttaatagccgcacacacaatctctgcgtcagaacgctcgtcaatatagatcttagacatttttagagagaactaacacaaccagcaataaaactgaacctactttatcatttttttattcatcatcctctggtggttcgtcgtttctatcgaatgtagctctgattaacccgtcatctataggtgatgctggttctggagattctggaggagatggattattatctggaagaatctctgttatttccttgttttcatgtatcgattgcgttgtaacattaagattgcgaaatgctctaaatttgggaggcttaaagtgttgtttgcaatctctacacgcgtgtctaactagtggaggttcgtcagctgctctagtttgaatcatcatcggcgtagtattcctacttttacagttaggacacggtgtattgtatttctcgtcgagaacgttaaaataatcgttgtaactcacatcctttattttatctatattgtattctactcctttcttaatgcattttataccgaataagagatagcgaaggaattctttttcggtgccgctagtacccttaatcatatcacatagtgttttatattccaaatttgtggcaatagacggtttatttctatacgatagtttgtttctggaatcctttgagtattctataccaatattattctttgattcgaatttagtttcttcgatattagattttgtattacctatattcttgatgtagtactttgatgatttttccatggcccattctattaagtcttccaagttggcatcatccacatattgtgatagtaattctcggatatcagtagcggctaccgccattgatgtttgttcattggatgagtaactactaatgtatacattttccatttataacacttatgtattaactttgttcatttatattttttcattattatgttgatattaacaaaagtgaatatatatgttaataattgtattgtggttatacggctacaatttcataatgagtggaagtcagtgtccgatgatcaatgacgatagctttactctgaaaagaaagtatcaaatcgatagtgcggagtcaacaatgaaaatggataagaagaggacaaagtttcagaatagagccaaaatggtaaaagaaataaatcagacaataagagcagcacaaactcattacgagacattgaaactaggatacataaaatttaagagaatgattaggactactactctagaagatatagcaccatctattccaaataatcagaaaacttataaactattctcggacatttcagccatcggcaaagcatcacagaatccgagtaagatggtatatgctctgctgctttacatgtttcccaatttgtttggagatgatcatagattcattcgttatagaatgcatccaatgagtaaaatcaaacacaagatcttctctcctttcaaacttaatcttattagaatattagtggaagaaagattctataataatgaatgcagatctaataaatggagaataattggaacacaagttgataaaatgttgatagctgaatctgataaatatacaatagatgcaaggtataacctaaaacccatgtatagaatcaagggaaaatctgaagaagataccctcttcatcaaacagatggtagaacaatgtgtgacatcccaggaattggtggaaaaagtgttgaagatactgtttagagatttgttcaagagtggagaatacaaagcgtacagatacgatgatgatgtagaaaatggatttattggattggatacactaaaattaaacattgttcatgatatagttgaaccatgtatgcctgttcgtaggccagtggctaagatactgtgtaaagaaatggtaaataaatactttgagaatccgctacatattattggtaaaaatcttcaagagtgcattgactttgttagtgaataggcatttcatctttctccaatactaattcaaattgttaaattaataatggatagtataaatagttattagtgataaaatagtaaaaataattattagaataagagtgtagtatcatagataactctcttctataaaaatggattttattcgtagaaagtatcttatatacacagtagaaaataatatagattttttaaaggatgatacattaagtaaagtaaacaattttaccctcaatcatgtactagctctcaagtatctagttagcaattttcctcaacacgttattactaaggatgtattagctaataccaatttttttgttttcatacatatggtacgatgttgtaaagtgtacgaagcggttttacgacacgcatttgatgcacccacgttgtacgttaaagcattgactaagaattatttatcgtttagtaacgcaatacaatcgtacaaggaaaccgtgcataaactaacacaagatgaaaaatttttagaggttgccgaatacatggacgaattaggagaacttataggcgtaaattatgacttagttcttaatccattatttcacggaggggaacccatcaaagatatggaaatcatttttttaaaactgtttaagaaaacagacttcaaagttgttaaaaaattaagtgttataagattacttatttgggcttacctaagcaagaaagatacaggcatagagtttgcggataatgatagacaagatatatacactctatttcaacaaactggtagaatcgtccatagcaatctaacagaaacgtttagagattatatctttcccggagataagactagctattgggtgtggttaaacgaaagtatagctaatgatgcggatattgttcttaatagacacgccattaccatgtatgataaaattcttagttatatatactctgagataaaacaaggacgcgttaataaaaacatgcttaagttagtttatatctttgagcctgaaaaagatatcagagaacttctgctagaaatcatatatgatattcctggagatatcctatctattattgatgcaaaaaacgacgattggaaaaaatattttattagtttttataaagctaattttattaacggtaatacatttattagtgatagaacgtttaacgaggacttattcagagttgttgttcaaatagatcccgaatatttcgataatgaacgaattatgtctttattctctacgagtgctgcggacattaaacgatttgatgagttagatattaataacagttatatatctaatataatttatgaggtgaacgatatcacattagatacaatggatgatatgaagaagtgtcaaatctttaacgaggatacgtcgtattatgttaaggaatacaatacatacctgtttttgcacgagtcggatcccatggtcatagagaacggaatactaaagaaactgtcatctataaaatccaagagtaaacggctgaacttgtttagcaaaaacattttaaaatattatttagacggacaattggctcgtctaggtcttgtgttagatgattataaaggagacttgttagttaaaatgataaaccatcttaagtctgtggaggatgtatccgcattcgttcgattttctacagataaaaaccctagtattcttccatcgctaatcaaaactattttagctagttataatatttccatcatcgtcttatttcaaaggtttttgagagataatctatatcatgtagaagaattcttggataaaagcatccatctaaccaagacggataagaaatatatacttcaattgataagacacggtagatcatagaacagaccaaatatattattaataatttggtatatacatagatattaattatcacatattaaaaattcacacatttttgataaatgggaactgctgcaacaattcagactcccaccaaattaatgaataaagaaaatgcagaaatgattttggaaaaaattgttgatcatatagttatgtatattagtgacgaatcaagtgattcagaaaataatcctgaatatattgattttcgtaacagatacgaagactatagatctctcattataaaaagtgatcacgagtttgtaaagctatgtaaaaatcatgcagagaaaagttctccagaaacgcaacaaatgattatcaaacacatatacgaacaatatcttattccagtatctgaagtactattaaaacctataatgtccatgggtgacataattacatataacggatgtaaagacaatgaatggatgctagaacaactctctaccctaaactttaacaatctccgcacatggaactcatgtagcataggcaatgtaacgcgtctgttttatacattttttagttatctgatgaaagataaactaaatatataagtataatcccattctaatactttaacctgatgtattagcatcttattagaatattaacctaactaaaagacataacataaaaactcattacatagttgataaaaagcggtaggatataaatattatggctgccaccgttccgcgttttgacgacgtgtacaaaaatgcacaaagaagaattctagatcaagaaacattttttagtagaggtctaagtagaccgttaatgaaaaacacatatctatttgataattacgcgtatggatggataccagaaactgcaatttggagtagtagatacgcaaacttagatgcaagtgactattatcccatttcgttgggattacttaaaaagttcgagtttctcatgtctctatataaaggtcctattccagtatacgaagaaaaagtaaatactgaattcatagccaatggatcgttctctggtagatacgtatcatatcttcgaaagttttctgctcttccaacaaacgagtttattagttttttattattgacctccatccctatctataatatcttattctggtttaaaaacacacagtttgatattactaaacacacattattcagatacgtctatacagataatgccaaacacctggcgttggctaggtatatgcatcaaacaggagactataagcctttgtttagtcgtctcaaagagaattatatatttaccggtcccgttccaatatgtatcaaagatatagatcaccctaatcttagtagagcaagaagtccatccgattatgagacattagctaatattagtactatattgtactttaccaagtatgatccggtattaatgtttttattgttttacgtacctgggtattcaattactacaaaaattactccagccgtagaatatctaatggataaactgaatctaacaaagagcgacgtacaactgttgtaaattattttatgcttcgtaaaatgtaggttttgaaccaaacattctttcaaagaatgagatgcataaaactttattatccaatagattgactatttcggacgtcaatcgtttaaagtaaacttcgtaaaatattctttgatcactgccgagtttaaaacttctatcgataattgtctcatatgttttaatatttacaagttttttggtccatggtacattagccggacaaatatatgcaaaataatatcgttctccaagttctatagtttctggattatttttattatattcagtaaccaaatacatattagggttatctgcggatttataatttgagtgatgcattcgactcaacataaataattctagaggagacgatctactatcaaattcggatcgtaaatctgtttctaaagaacggagaatatctatacatacctgattagaattcatccgtccttcagacaacatctcagacagtctggtcttgtatgtcttaatcatattcttatgaaacttggaaacatctcttctagtttcactagtacctttattaattctctcaggtacagattttgaattcgacgatgctgagtatttcatcgttgtatatttcttcttcgattgcataatcagattcttatataccgcctcaaactctattttaaaattattaaacaatactctattattaatcagtcgttctaactctttcgctatttctatagacttatcgacatcttgactgtctatctctgtaaacacggagtcggtatctccatacacgctacgaaaacgaaatctgtaatctataggcaacgatgttttcacaatcggattaatatctctatcgtccatataaaatggattacttaatggattggcaaaccgtaacataccgttagataactctgctccatttagtaccgattctagatacaagatcattctacgtcctatggatgtgcaactcttagccgaagcgtatgagtatagagcactatttctaaatcccatcagaccatatactgagttggctactatcttgtacgtatattgcatggaatcatagatggccttttcagttgaactggtagcctgttttaacatctttttatatctggctctctctgccaaaaatgttcttaatagtctaggaatggttccttctatcgatctatcgaaaattgctatttcagagatgaggttcggtagtctaggttcacaatgaaccgtaatatatctaggaggtggatatttctgaagcaatagctgattatttatttcttcttccaatctattggtactaacaacgacaccgactaatgtttccggagatagatttccaaagatacacacattaggatacagactgttataatcaaagattaatacattattactaaacattttttgttttggagcaaataccttaccgccttcataaggaaacttttgttttgtttctgatctaactaagatagttttagtttccaacaatagctttaacagtggacccttgatgactgtactcgctctatattcgaataccatggattgaggaagcacatatgttgacgcacccgcgtctgtttttgtttctactccataatactcccacaaatactgacacaaacaagcatcatgaatacagtatctagccatatctaaagctatgtttagattataatccttatacatctgagctaaatcaacgtcatcctttccgaaagataatttatatgtatcattaggtaaagtaggacataatagtacgactttaaatccattttcccaaatatctttacgaattactttacatataatatcctcatcaacagtcacataattacctgtggttaaaacctttgcaaatgcagcggctttgcctttcgcgtctgtagtatcgtcaccgataaacgtcatttctctaactcctctatttaatactttacccatgcaactgaacgcgttcttggatatagaatccaatttgtacgaatccaatttttcagatttttgaatgaatgaatatagatcgaaaaatatagttccattattgttattaacgtgaaacgtagtattggccatgccgcctactcccttatgactagactgatttctctcataaatacagagatgtacagcttcctttttgtccggagatctaaagataatcttctctcctgttaataactctagacgattagtaatatatctcagatcaaagttatgtccgttaaaggtaacgacgtagtcgaacgttagttccaacaattgtttagctattcgtaacaaaactatttcagaacatagaactagttctcgttcgtaatccatttccattagtgactgtatcctcaaacatcctctatcgacggcttcttgtatttcctgttccgttaacatctcttcattaatgagcgtaaacaataatcgtttaccacttaaatcgatataacagtaacttgtatgcgagattgggttaataaatacagaaggaaacttcttatcgaagtgacactctatatctagaaataagtacgatcttgggatatcgaatctaggtatttttttagcgaaacagttacgtggatcgtcacaatgataacatccattgttaatctttgtcaaatattgctcgtccaacgagtaacatccgtctggagatatcccgttagaaatataaaaccaactaatattgagaaattcatccatggtggcattttgtatgctgcgtttctttggctcttctatcaaccacatatctgcgacggagcattttctatctttaatatctagattataacttattgtctcgtcaatgtctatagttctcatctttcccaacggcctcgcattaaatggaggaggagacaatgactgatatatttcgtccgtcactacgtaataaaagtaatgaggaaatcgtataaatacggtctcaccatttcgacatctggatttcagatataaaaatctgttttcaccgtgactttcaaaccaattaatgcaccgaacatccatttatagaatttagaaatatattttcatttaaatgaatcccaaacattggggaagagccgtatggaccattatttttatagtactttcgcaagcgggtttagacggcaacatagaagcgtgtaaacgaaaactatatactatagttagcactcttccatgtcctgcatgtagacggcacgcgactattgctatagaggacaataatgtcatgtctagcgatgatctgaattatatttattattttttcatcagattatttaacaatttggcatctgatcccaaatacgcaatcgatgtgtcaaaggttaaacctttataaacttaacccattataaaacttatgattagtcacgactgaaataaccgcgtgattattttttggtataattctacacggcatggtttctgtgactatgaattcaacccccgttacattagtgaaatctttaacaaacagcaagggttcgtcaaagacataaaactcattgtttacaatcgaaatagaccccctatcacacttaaaataaaaaatatccttatcctttaccaccaaataaaattctgattggtcaatgtgaatgtattcacttaacagttccacaaatttatttattaactccgaggcacatacatcgtcggtattttttatggcaaactttactcttccagcatccgtttctaaaaaaatattaacgagttccatttatatcatccaatattattgaaatgacgttgatggacagatgatacaaataagaaggtacggtacctttgtccaccatctcctccaattcatgctctattttgtcattaactttaatgtatgaaaacagtacgccacatgcttccatgacagtgtgtaacactttggatacaaaatgtttgacattagtataattgtttaagactgtcaatctataatagatagtagctataatatattctatgatggtattgaagaagatgacaatcttggcatattgatcatttaacacagacatggtatcaacagatagcttgaatgaaagagaatcagtaattggaataagcgtcttctcgatggagtgtccgtataccaacatgtctgatattttgatgtattccattaaattatttagttttttctttttattctcgttaaacagcatttctgtcaacggaccccaacatcgttgaccgattaagttttgattgatttttccgtgtaaggcgtatctagtcagatcgtatagcctatccaataatccatcatctgtgcgtagatcacatcgtacactttttaattctctatagaagagcgacagacatctggaacaattacagacagcaatttctttattctctacagatgtaagatacttgaagacattcctatgatgatgcagaattttggataacacggtattgatggtatctgttaccataattcctttgatggctgatagtgtcagagcacaagatttccaatctttgacaatttttagcaccattatctttgttttgatatctatatcagacagcatggtgcgtctgacaacacagggattaagacggaaagatgaaatgattctctcaacatcttcaatggataccttgctattttttctggcattatctatatgtgcgagaatatcctctagagaatcagtatcctttttgatgatagtggatctcaatgacatgggacgtctaaaccttcttattctatcaccagattgcatggtgatttgtcttctttcttttatcataatgtaatctctaaattcatcggcaaattgtctatatctaaaatcataatatgagatgtttacctctacaaatatctgttcgtccaatgttagagtatctacatcagttttgtattccaaattaaacatggcaacggatttaattttatattcctctattaagtcctcgtcgataataacagaatgtagataatcatttaatccatcgtacatggttggaagatgcttgttgacaaaatctttaattgtcttgatgaaggtgggactatatctaacatcttgattaataaaatttataacattgtccataggatactttgtaactagttttatacacatctcttcatcggtaagtttagacagaatatcgtgaacaggtggtatattatattcatcagatatacgaagaacaatgtccaaatctatattgtttaatatattatatagatgtagtgtagctcctacaggaatatctttaactaagtcaatgatttcatcaaccgttagatctattttaaagttaatcatataggcattgatttttaaaaggtatgtagccttgactacattctcattaattaaccattccaagtcactgtgtgtaagaagattatattctatcataagcttgactacatttggtcccgataccattaaagaattcttatgatataaggaaacagcttttaggtactcatctactctacaagaattttggagagccttaacgatatcagtgacgtttattatttcaggaggaaaaaacctaacattgagaatgtcggagttaatagcttccagatacagtgattttggcaatagtccgtgtaatccataatccagtaacacgagctggtgcttgctagacaccttttcaatgtttaatttttttgaaataagctttgataaagccttcctcgcaaattccggatacatgaacatgtcggcgacatgattaagtattgttttttcattatttttatattttctcaacaagttctcaataccccaatagatgatagaatatcacccaatgcgtccatgttgtctatttccaacaggtcgctatatccaccaatagaagttttcccaaaaaagattctaggaacagttctaccaccagtaatttgttcaaaataatcccgcaattcattttcgggtttaaattctttaatatcgacaatttcatacgctcctcttttgaaactaaacttatttagaatatccagtgcatttctacaaaaaggacatgtatacttgacaaaaattgtcactttgttattggccaacctttgttgtacaaattcctcggccattttaatatttaagtgatataaaactatctcgacttatttaactctttagtcgagatatatggacgcagatagctatatgatagccaactacagaaggcaaacgctataaaaaacataattacgacgagcatatttataaatatttttattcagcattacttgatatagtaatattaggcacagtcaaacattcaaccactctcgatacattaactctctcattttctttaacaaattctgcaatatcttcgtaaaaagattcttgaaactttttagaatatctatcgactctagatgaaatagcgttcgtcaacatactatgttttgtatacataaaggcgcccattttaacagtttctagtgacaaaatgctagcgatcctaggatcctttagaatcacatagattgacgattcgtctctcttagtaactctagtaaaataatcatacaatctagtacgcgaaataatattatccttgacttgaggagatctaaacaatctagttttgagaacatcgataagttcatcgggaatgacatacatactatctttaatagaactcttttcatccagttgaatggattcgtccttaaccaactgattaatgagatcttctattttatcattttccagatgatatgtatgtccattaaagttaaattgtgtagcgcttctttttagtctagcagccaatactttaacatcactaatatcgatatacaaaggagatgatttatctatggtattaagaattcgtttttcgacatccgtcaaaaccaattcctttttgcctgtatcatccagttttccatcctttgtaaagaaattattttctactagactattaataagactgataaggattcctccataattgcacaatccaaactttttcacaaaactagactttacgagatctacaggaatgcgtacttcaggtttcttagcttgtgattttttcttttgcggacattttcttgtgaccaactcatctaccatttcattgattttagcagtgaaataagctttcaatgcacgggcactgatactattgaaaacgagttgatcttcaaattccgccatttaagttcaccaaacaacttttaaatacaaatatatcaatagtagtagaataagaactataaaaaaaataataattaaccaataccaaccccaacaaccggtattattagttgatgtgactgttttctcatcacttagaacagatttaacaatttctataaagtctgtcaaatcatcttccggagaccccataaatacaccaaatatagcggcgtacaacttatccatttatacattgaatattggcttttctttatcgctatcttcatcatattcatcatcaatatcaacaagtcccagattacgagccagatcttcttctacattttcagtcattgatacacgttcactatctccagagagtccgataacgttagccaccacttctctatcaatgattagtttcttgagtgcgaatgtaatttttgtttccgttccggatctatagaagacgataggtgtgataattgccttggccaattgtctttctcttttactgagtgattctagttcaccttctatagatctgagaatggatgattctccagccgaaacatattctaccatggctccgtttaatttgttgatgaagatggattcatccttaaatgttttctctgtaatagtttccaccgaaagactatgcaaagaatttggaatgcgttccttgtgcttaatgtttccatagacggcttctagaagttgatacaacataggactagccgcggtaacttttatttttagaaagtatccatcgcttctatcttgtttagatttatttttataaagtttagtctctccttccaacataataaaagtggaagtcatttgactagataaactatcagtaagttttatagagatagacgaacaattagcgtattgagaagcatttagtgtaacgtattcgatacattttgcattagatttactaatcgattttgcatactctataacacccgcacaagtctgtagagaatcgctagatgcagtaggtcttggtgaagtttcaactctcttcttgattaccttactcatgattaaacctaaataattgtactttgtaatataatgatatatattttcactttatctcatttgagaataaaaatgtttttgtttaaccactgcatgatgtacagatttcggaatcgcaaaccaccagtggttttattttatccttgtccaatgtgaattgaatgggagcggatgcgggtttcgtacgtagatagtacattcccgtttttagaccgagactccatccgtaaaaatgcatactcgttagtttggaataactcggatctgctatatggatattcatagattgactttgatcgatgaaggctcccctgtctgcagccatttttatgatcgtcttttgtggaatttcccaaatagttttataaactcgcttaatatcttctggaaggtttgtattctgaatggatccaccatctgccataatcctattcttgatctcatcattccataattttctctcggttaaaactctaaggagatgcggattaactacttgaaattctccagacaatactctccgagtgtaaatattactggtatacggttccaccgactcattatttcccaaaatttgagcagttgatgcagtcggcataggtgccaccaataaactatttctaagaccgtatgttctgattttatcttttagaggttcccaattccaaagatccgacggtacaacattccaaagatcatattgtagaataccgttactggcgtacgatcctacatatgtatcgtatggtccttccttctcagctagttcacaactcgcctctaatgcaccgtaataaatggtttcgaagatcttcttatttagatcttgtgcttccaggctatcaaatggataatttaagagaataaacgcgtccgctaatccttgaacaccaataccgataggtctatgtctcttattagagatttcagcttctggaataggataataattaatatctataattttattgagatttctgacaattactttgaccacatccttcagtttgagaaaatcaaatcgcccatctattacaaacatgttcaaggcaacagatgccagattacaaacggctacctcattagcatccgcatattgtattatctcagtgcaaagattactacacttgatagttcctaaattttgttgattactctttttgttacacgcatccttataaagaatgaatggagtaccagtttcaatctgagattctataatcgctttccagacgactcgagcctttattatagatttgtatctcctttctctttcgtatagtgtatacaatcgttcgaactcgtctccccaaacattgtccaatccaggacattcatccggacacatcaacgaccactctccgtcatccttcactcgtttcataaagagatcaggaatccaaagagctataaatagatctctggttctatgttcctcgtttcctgtattctttttaagatcgaggaacgccataatatcagaatgccacggttccaagtatatggccataactccaggccgtttgtttcctccctgatctatgtatctagcggtgttattataaactctcaacattggaataataccgtttgatataccattggtaccggagatatagcttccactggcacgaatattactaattgatagacctattccccctgccattttagagattaatgcgcatcgttttaacgtgtcatagataccctctatgctatcatcgatcatgttaagtaaaaaacagctagacatttggtgacgactagttcccgcattaaataaggtaggagaagcgtgcgtaaaccatttttcagaaagtagattgtacgtctcaatagctgagtctatatcccattgatgaattcctactgcgacacgcattaacatgtgctgaggtctttcaacgatcttgttgtttattttcaacaagtaggatttttccaaagttttaaaaccaaaatagttgtatgaaaagtctcgttcgtaaataataaccgagttgagtttatccttatatttgttaactatatccatggtgatacttgaaataatcggagaatgtttcccatttttaggattaacatagttgaataaatcctccatcacttcactaaatagtttttttgtttccttgtgtagatttgatacggctattctggcggctagaatggcataatccggatgttgtgtagtacaagtggctgctatttcggctgccagagtgtccaattctaccgttgttactccattatatattccttgaataaccttcatagctattttaataggatctatatgatccgtgtttaagccataacataattttctaatacgagacgtgattttatcaaacatgacattttccttgtatccatttcgtttaatgacaaacatttttgttggtgtaataaaaaaattatttaacttttcattaatagggatttgacgtatgtagcgtacaaaattatcgttcctggtatatagataaagagtcctatatatttgaaaatcgttacggctcgattaaactttaatgattgcatagtgaatatatcattaggatttaactccttgactatcatggcggcgccagaaattaccatcaaaagcattaatacagttatgccgatcgcagttagaacggttatagcatccaccatttatatctaaaaattagatcaaagaatatgtgacaaagtcctagttgtatactgagaattgacgaaacaatgtttcttacatatttttttcttattagtaactgacttaatagtaggaactggaaagctagacttgattattctataagtatagatacccttccagataatgttctctttgataaaagttccagaaaatgtagaattttttaaaaagttatcttttgctattaccaagattgtgtttagacgcttattattaatatgagtaatgaaatccacaccgcctctagatatcgcctttatttccacattagatggtaaatccaatagtgaaactatctttttaggaatgtatggactcgcgtttagaggagtgaacgtcttgggcgtcggaaaggatgattcgtcaaacgaataaacaatttcacaaatggatgttaatgtattagtaggaaatttcttgacgctagtggagttgaagattctaatggatgatgttctacctatttcatccgataacatgttaatttccgacaccaacggttttaatatttcgatgatatacggtagtctctctttcggacttatatagcttattccacaatacgagtcattatatactccaaaaaacaaaataactagtataaaatctgtatcgaatgggaaaaacgaaattatcgacataggtatagaatccggaacattgaacgtattaatacttaattctttttctgtggtaagtaccgataggttattgacattgtatggttttaaatattctataacttgagacttgatagatattagtgatgaattgaaaattatttttatcaccacgtgtgtttcaggatcatcgtcgacgcccgtcaaccaaccgaatggagtaaaataaatatcattaatatatgctctagatattagtatttttatcaatcctttgattatcatcttctcgtaggcgaatgattccatgatcaagagtgatttaagaacatcctccggagtattaatgggcttagtaaacagtccatcgttgcaataataaaagttatccaagttaaaggatattatgcattcgtttaaagatatcacctcatctgacggagacaattttttggtaggttttagagactttgaagctacttgtttaacaaagttattcatcgtcgtctactattctatttaattttgtagttaatttatcacatatcacattaattgactttttggtccatttttccatacgtttatattcttttaatcctgcgttatccgtttccgttatatccagtgatagatcgtgcaggttaaatagaatgctcttaaataatgtcatttttttatccgctaaaaatttaaagaatgtataaacctttttcagagatttgaaactcttaggtggtgtcctagtacacaatatcataaacaaactaataaacattccacattcagattccaacagctgattaacttccacattaatacagcctattttcgctccaaatgtacattcgaaaaatctgaataaaacatcgatgtcacaatttgtattatccaatacagaatgtctgtgattcgtgttaaaaccatcggagaaggaatagaaataaaaattattatagtggtggaattcagttggaatattgcctccggagtcataaaaggatactaaacattgttttttatcataaattacacatttccaatgagacaaataacaaaatccaaacattacaaatctagaggtagaacttttaattttgtctttaagtatatacgataagatatgtttattcataaacgcgtcaaatttttcatgaatcgctaaggagtttaagaatctcatgtcaaattgtcctatataatccacttcggatccataagcaaactgagagactaagttcttaatacttcgattgctcatccaggctcctctctcaggctctattttcatcttgacgacctttggattttcaccagtatgtattcctttacgtgataaatcatcgattttcaaatccatttgtgagaagtctatcgccttagatactttttcccgtagtcgaggtttaaaaaaatacgctaacggtatactagtaggtaactcaaagacatcatatatagaatggtaacgcgtctttaactcgtcggttaactctttcttttgatcgagttcgtcgctactattgggtctgctcaggtgccccgactctactagttccaacatcataccgataggaatacaagacactttgccggcggttgtagatttatcatatttctccactacatatccgttacaatttgttaaaaatttagatacatctatattgctacataatccagctagtgaatatatatgacataataaattggtaaatcctagttctggtattttactaattactaaatctgtatatctttccatttatcatggaaaagaatttaccagatatcttcttttttccaaactgcgttaatgtattctcttacaaatattcacaagatgaattcagtaatatgagtaaaacggaacgtgatagtttctcattggccgtgtttccagttataaaacatagatggcataacgcacacgttgtaaaacataaaggaatatacaaagttagtacagaagcacgtggaaaaaaagtatctcctccatcactaggaaaacccgcacacataaacctaaccacgaaacaatatatatacagtgaacacacaataagctttgaatgttatagttttctaaaatgtataacaaatacagaaatcaattcgttcgatgagtatatattaagaggactattagaagctggtaatagtttacagatattttccaattccgtaggtaaacgaacagatactataggtgtactagggaataagtatccatttagcaaaattccattggcctcattaactcctaaagcacaacgagagatattttcagcgtggatttctcatagacctgtagttttaactggaggaactggagtgggtaagacgtcacaggtacccaagttattgctttggtttaattatttatttggtggattctctactctagataaaatcactgactttcacgaaagaccagtcattctatctcttcctaggatagctttagttagattgcatagcaataccattttaaaatcattgggatttaaggtactagatggatctcctatttctttacggtacggatctataccggaagaattaataaacaaacaaccaaaaaaatatggaattgtattttctacccataagttatctctaacaaaactatttagttatggcactcttattatagacgaagttcatgagcatgatcaaataggagatattattatagcagtagcgagaaagcatcatacgaaaatagattctatgtttttaatgactgccacgttagaggatgacagggaacggctaaaagtatttttacctaatcccgcatttatacatattcctggagatacactgtttaaaattagcgaggtatttattcataataagataaatccatcttccagaatggcatacatagaagaagaaaagagaaatttagttactgctatacagatgtatactcctcctgatggatcatccggtatagtctttgtggcatccgttgcacagtgtcacgaatataaatcatatttagaaaaaagattaccgtatgatatgtatattattcatggtaaggtcttagatatagacgaaatattagaaaaagtgtattcatcacctaatgtatcgataattatttctactccttatttggaatccagcgttactatacgcaatgttacacacatttatgatatgggtagagtttttgtccccgctccttttggaggatcgcaagaatttatttctaaatctatgagagatcaacgaaaaggaagagtaggaagagttaatcctgggacatacgtatatttctatgatctgtcttatatgaagtctatacagcgaatagattcagaatttctacataattatatattgtacgctaataagtttaatctaacactccccgaagatttgtttataatccctacaaatttggatattctatggcgtacaaaggaatatatagactcgttcgatattagtacagaaacatggaataaattattatccaattattatatgaagatgatagagtatgctaaactttatgtactaagtcctattctcgctgaggagttggataactttgagaggacgggagaattaactagtattgtacgagaagccattttatctctaaatttacgaattaagattttaaattttaaacataaagatgatgatacgtatatacacttttgtaaaatattattcggtgtctataacggaacaaacgctactatatattatcatagacctctaacgggatatatgaatatgatttcagatactatatttgttcctgtagataataactaaaaatcaaactctaatgaccacatctttttttagagatgaaaaattttccacatctccttttgtagacacgactaaacattttgcagaaaaaagtttattagtgtttagataatcgtatacttcatcagtgtagatagtaaatgtgaacagataaaaggtattcttgctcaatagattggtaaattccatagaatatattaatcctttcttcttgagatcccacatcatttcaaccagagacgttttatccaatgatttacctcgtactataccacatacaaaactagattttgcagtgacgtcgtacctggtattcctaccaaacaaaattttacttttagttcttttagaaaattctaaggtagaatctctatttgccaatatgtcatctatggaattaccactagcaaaaaatgatagaaatatatattgatacatcgcagctggttttgatctactatactttaaaaacgaatcagattccataattgcctgtatatcatcagctgaaaaactatgttttacacgtattccttcggcatttctttttaatgatatatcttgtttagacaatgataaagttatcatgtccatgagagacgcgtctccgtatcgtataaatatttcattagatgttagacgcttcattaggggtatacttctataaggtttcttaatcagtccatcattggttgcgtcaagaactactatcggatgttgttgggtatctctagtgttacacatggccttactaaagtttgggtaaataactatgatatctctattaattatagatgcatatatttcattcgtcaaggatattagtatcgacttgctatcgtcattaatacgtgtaatgtaatcatataaatcatgcgatagccaaggaaaattcaaatagatgttcatcatataatcgtcgctataattcatattaatactttgacattgactaatttgtaatatagcctcgccacgaagaaagctctcgtattcagtttcatcgataaaggataccgttaaatataactggttgccgatagtctcatagtctattaagtggtaagtttcgtacaaatacagaatccctaaaatattatctaatgttggattaatctttaccataactgtataaaatggagacggagtcataactattttaccgtttgtacttactggaatagatgaaggaataatctccggacatgctggtaaagacccaaatgtctgtttgaagaaatccaatgttccaggtcctaatctcttaacaaaaattacgatattcgatcccgatatcctttgcattctatttaccagcatatcacgaactatattaagattatctatcatgtctattctcccaccgttatataaatcgcctccgctaagaaacgttagtatatccatacaatggaatacttcatttctaaaatagtattcgttttctaattctttaatgtgaaatcgtatactagaaagggaaaaattatctttgagttttccgttagaaaagaaccacgaaactaatgttctgattgcgtccgattccgttgctgaattaatggatttacaccaaaaactcatataacttctagatgtagaagcattcgctaaaaaattagtagaatcaaaggatataagtagatgttccaacaagtgagcaattcccaagatttcatctatatcattctcgaatccgaaattagaaattcccaagtagatatcctttttcatccgatcattgatgaaaatacgaactttattcggtaagacaatcatttactaaggagtaaaataggaagtaatgttcgtatgtcgttatcatcgtataaattaaaggtgtgttttttaccattaagtgacattataattttaccaatattggaattataatataggtgtatttgcgcactcgcgacggttgatgcatcggtaaatatagctgtatctaatgttctagtcggtatttcatcatttcgctgtctaataatagcgttttctctatctgtttccattacagctgcctgaagtttattggtcggataatatgtaaaataataagaaatacatacgaataacaaaaataaaataagatataataaagatgccatttagagatctaattttgttcaacttgtccaaattcctacttacagaagatgaggaatcgttggagatagtgtcttccttatgtagaggatttgaaatatcttatgatgacttgataacttactttccagataggaaataccataaatatatttctaaagtatttgaacatgtagatttatcggaggaattaagtatggaattccatgatacaactttgcgagatttagtttatcttagattgtacaagtattccaagtgtatacggccgtgttataaattaggagataatctaaaaggcatagttgttataaaggacaggaatatttatattagggaagcaaatgatgacttgatagaatatctcctcaaggaatacactcctcagatttatacatattctaatgagcgcgtccccataactggttcaaaattaattctttgtggattttctcaagttacatttatggcgtatacaacgtcgcatataacaacaaataaaaaggtagatgttctcgtttccaaaaaatgtatagatgaactagtcgatccaataaattatcaaatacttcaaaatttatttgataaaggaagcggaacaataaacaaaatactcaggaagatattttattcggtaacaggtggccaaactccataggtagctttttctatttcggattttagaatttccaaattcaccagcgatttatcggttttggtgaaatccaaggatttattaatgtccacaaatgccatttgttttgtctgtggattgtatttgaaaatggaaacgatgtagttagatagatgcgctgcgaagtttcctattagggttccgcgcttcacgtcacccagcatacttgaatcaccatcctttaaaaaaaatgataagatatcaacatggagtatatcatactcggattttaattcttctactgcatcactgacattttcacaaatactacaatacggtttaccgaaaataatcagtacgttcttcatttatgggtatcaaaaacttaaaatcgttactgctggaaaataaatcactgacgatattagatgataatttatacaaagtatacaatggaatatttgtggatacaatgagtatttatatagccgtcgccaattgtgtcagaaacttagaagagttaactacggtattcataaaatacgtaaacggatgggtaaaaaagggagggcatgtaaccctttttatcgatagaggaagtataaaaattaaacaagacgttagagacaagagacgtaaatattctaaattaaccaaggacagaaaaatgctagaattagaaaagtgtacatccgaaatacaaaatgttaccggatttatggaagaagaaataaaggcagaaatgcaattaaaaatcgataaactcacatttcaaatatatttatctgattctgataacataaaaatatcattgaatgagatactaacacatttcaacaataatgagaatgttacattattttattgtgatgaacgagacgcagaattcgttatgtgtctcgaggctaaaacacatttctctaccacaggagaatggccgttgataataagtaccgatcaggatactatgctatttgcatctactgataatcatcctaagatgataaaaaacttaactcaactgtttaaatttgttccctcggcagaggataactatttagcaaaattaacggcgttagtgaatggatgtgatttctttcctggactctatggggcatctataacacccaacaacttaaacaaaatacaattgtttagtgattttacaatcgataatatagtcactagtttggcaattaaaaattattatagaaagactaactctaccgtagacgtgcgtaatattgttacgtttataaacgattacgctaatttagacgatgtctactcgtatgttcctccttgtcaatgcactgttcaagaatttatattttccgcattagatgaaaaatggaacaattttaaatcatcttatttagagaccgttccgttaccctgtcaattaatgtacgcgttagaaccacgcaaggagattgatgtttcagaagttaaaactttatcatcttatatagatttcgaaaatactaaatcagatatcgatgttataaaatctatatcctcgatcttcggatattctaacgaaaactgtaacacgatagtattcggcatctataaggataatttactactgagtataaataattcattttactttaacgatagtctgttaataaccaatactaaaagtgataatataataaatataggttactagattaaaaatggtgttccaactcgtgtgctctacatgcggtaaagatatttctcacgaacgatataaattgattatacgaaaaaaatcattaaaggatgtactcgtcagtgtaaagaacgaatgttgtaggttaaaattatctacacaaatagaacctcaacgtaacttaacagtgcaacctctattggatataaactaatatggatccggttaattttatcaagacatatgcgcctagaggttctattatttttattaattataccatgtcattaacaagtcatttgaatccatcgatagaaaaacatgtgggtatttattatggtacgttattatcggaacacttggtagttgaatctacctatagaaaaggagttcgaatagtcccattggatagtttttttgaaggatatcttagtgcaaaagtatacatgttagagaatattcaagttatgaaaatagcagctgatacgtcattaactttattgggtattccgtatggatttggtcataatagaatgtattgttttaaattggtagctgactgttataaaaatgccggtgttgaaacatcgtctaaacgaatattaggtaaagatatttttctgagccaaaacttcacagacgataatagatggataaagatatatgattctaataatttaacattttggcaaattgattaccttaaagggtgagttaatatgcataactactcctccgttgttttttcccacgttctttttcttaacgttgtttgccatcactctcataatgtaaagatattctaaaatggtaaacttttgcatatcggacgcagaaattggtataaatgttgtaattgtattatttcccgtcaatggactagtcacagctccatcagttttatatcctttagagtatttctcactcgtgtctagcattctagagcattccatgatctgtttatcgttgatattggccggaaagatagattttttattttttattatattactattggcaattgtagatataacttctggtaaatatttttctaccttttcaatttcttctattttcaagccggctatatattctgctatattgttgctagtatcaataccttttctggctaagaagtcatatgtggtattcactatatcagttttaactggtagttccattagcctttccacttctgcagaataatcagaaattggttctttaccagaaaatccagctactataataggctcaccgatgatcattggcaaaatcctatattgtaccagattaatgagagcatatttcatttccaataattctgctagttcttgagacattgatttatttgatgaatctagttggttctctagatactctaccatttctgccgcatacaataacttgttagataaaatcagggttatcaaagtgtttagcgtggctagaatagtgggcttgcatgtattaaagaatgcggtagtatgagtaaaccgttttaacgaattatatagtctccagaaatctgtggcgttacatacatgagccgaatgacatcgaagattgtccaatatttttaatagctgctctttgtccattatttctatatttgactcgcaacaattgtagataccattaatcactgattcctttttcgatgccggacaatagcacaattgtttagctttggactctatgtattcagaattaatagatatatctcttaatacagattgcactatacattttgaaactatgtcaaaaattgtagaacgacgctgttctgcagccatttaactttaaataatttacaaaaatttaaaatgagcatccgtataaaaatcgataaactgcgccaaattgtggcatatttttcagagttcagtgaagaagtgtctataaatgtagactcgacggatgagttaatgtatatttttgccgccttgggcggatctgtaaacatttgggccattatacctctcagtgcatcagtgttctaccgaggagccgaaaacattgtgtttaatcttcctgtgtccaaggtaaaatcgtgtttgtgtagttttcacaatgatgccatcatagatatagaacctgatctggaaaataatctagtaaaactttctagttatcatgtagtaagtgtcgattgtaataaggaactgatgcctattaggacagatactactatttgtctaagtatagatcaaaagaaatcttatgtgtttaattttcacaagtatgaagaaaaatgttgtggtagaaccgtcattcatttagaatggttgttgggctttatcaagtgtattagtcagcatcagcatctggctattatgtttaaagatgacaatattattatgaagactcctggtaatactgatgcattttccagggaatattctatgactgaatgttctcaagaactacaaaagttttctttcaaaatagctatctcgtctctcaacaaactacgaggattcaaaaagagagtcaatgtttttgaaactagaatcgtaatggataatgacgataacattctaggaatgttgttttcggatagagttcaatcctttaagatcaacatctttatggcgtttttagattaatactttcaatgagataaatatgggtggcggagtaagtgttgagctccctaaacgggatccgcctccgggagtacccactgatgagatgttattaaacgtggataaaatgcatgacgtgatagctcccgctaagcttttagaatatgtgcatataggaccactagcaaaagataaagaggataaagtaaagaaaagatatccagagtttagattagtcaacacaggacccggtggtctttcggcattgttaagacaatcgtataatggaaccgcacccaattgctgtcgcacttttaatcgtactcattattggaaaaaggatggaaagatatcagataagtatgaagagggtgcagtattagaatcgtgttggccagacgttcacgacactggaaaatgcgatgttgatttattcgactggtgtcagggggatacgttcgatagaaacatatgccatcagtggatcggttcagcctttaataggagtaatagaactgtagagggtcaacaatcgttaataaatctgtataataagatgcaaacattatgtagtaaagatgctagtgtaccaatatgtgaatcatttttgcatcatttacgcgcacacaatacagaagatagcaaagagatgatcgattatattctaagacaacagtctgcggactttaaacagaaatatatgagatgtagttatcccactagagataagttagaagagtcattaaaatatgcggaacctcgagaatgttgggatccagagtgttcgaatgccaatgttaatttcttgctaacacgtaattataataatttaggactttgcaatattgtacgatgtaatactagcgtgaacaacttacagatggataaaacttcctcattaagattgtcatgtggattaagcaatagtgatagattttctactgttcccgtcaatagagcaaaagtagttcaacataatattaaacactcgttcgacctaaaattgcatttgatcagtttattatctctcttggtaatatggatactaattgtagctatttaaatgggtgccgcagcaagcatacagacgacggtgaatacactcagcgaacgtatctcgtctaaattagaacaagaagcgaatgctagtgctcaaacaaaatgtgatatagaaatcggaaatttttatatccgacaaaaccatggatgtaacctcactgttaaaaatatgtgctctgcggacgcggatgctcagttggatgctgtgttatcagccgctacagaaacatatagtggattaacaccggaacaaaaagcatacgtgccagctatgtttactgctgcgttaaacattcagacgagtgtaaacactgttgttagagattttgaaaattatgtaaaacaaacttgtaattctagcgcggtcgtcgataacaaattaaagatacaaaacgtaatcatagatgaatgttacggagccccaggatctccaacaaatttggaatttattaatacaggatctagcaaaggaaattgtgccattaaggcgttgatgcaattgactactaaggccactactcaaatagcacctagacaagttgctggtacaggagttcagttttatatgattgttatcggtgttataatattggcagcgttgtttatgtactatgccaagcgtatgctgttcacatccaccaatgataaaatcaaacttattttagccaataaggaaaacgtccattggactacttacatggacacattctttagaacttctccgatggttattgctaccacggatatgcaaaactgaaaatatattgataatattttaatagattaacatggaagttatcgctgatcgtctagacgatatagtgaaacaaaatatagcggatgaaaaatttgtagattttgttatacacggtctagagcatcaatgtcctgctatacttcgaccattaattaggttgtttattgatatactattatttgttatagtaatttatatttttacggtacgtctagtaagtagaaattatcaaatgttgttggcgttggtggcgctagtcatcacattaactattttttattactttatactataatagtactagactgacttctaacaaacatctcacctgccataaataaatgcttgatattaaagtcttctatttctaacactattccatctgtggaaaataatactctgacattatcgctaattgacacatcggtgagtgatatgcctataaagtaataatcttctttgggcacatataccagtgtaccaggttctaacaacctatttactggtgctcctgtagcatactttttctttaccttgagaatatccatcgtttgcttggtcaatagcgatatgtgattttttatcaaccactcgaaaaagtaattggagtgttcatatcctctacgggctattgtctcatggccgtgtatgaaatttaagtaacacgactgtggtagatttgttctatagagccggttgccgcaaatagatagaactaccaatatgtctgtacaaatgttaaacattaattgattaacagaaaaaacaatgttcgttctgggaatagaaaccagatcaaaacaaaattcgttagaatatatgccacgtttatacattgaatataaaataactacagtttgaaaaataacagtatcatttaaacatttaacttgcggggttaatttcacaactttactgtttttaagctgttcaaaatatagcatcgatccatgagaaatacgtttagccgcctttaatagaggaaatcccaccgcctttctggatctcaccaacgacgatagttctgaccagcaactcatttcttcatcatccacctgttttaacatataataggcaggagatagatatccgtcattgcaatattccttttcgtaggcacacaatctaatattgataaaatctccattctcttctctgcatttattatcttgtttcggtggctgattaggctgtagtcttggtttaggccttggtctatcgttgttgaatctattttggtcattaaatctttcatttcttcctggtatatttctatcacctcgtttggttggatttttgtctatattatcgtttgtaacatcggtacgggtattcatttatcacaaaaaaaacttctctaaatgagtctactgctagaaaacctcatcgaagaagataccatattttttgcaggaagtatatctgagtatgatgatttacaaatggttattgccggcgcaaaatccaaatttccaagatctatgctttctatttttaatatagtacctagaacgatgtcaaaatatgagttggagttgattcataacgaaaatatcacaggagcaatgtttaccacaatgtataatataagaaacaatttgggtctaggagatgataaactaactattgaagccattgaaaactatttcttggatcctaacaatgaagttatgcctcttattattaataatacggatatgactgccgtcattcctaaaaaaagtggtaggagaaagaataagaacatggttatcttccgtcaaggatcatcacctatcttgtgcattttcgaaactcgtaaaaagattaatatttataaagaaaatatggaatccgcatcgactgagtatacacctatcggagacaacaaggctttgatatctaaatatgcgggaattaatgtcctgaatgtgtattctccttccacatccatgagattgaatgccatttacggattcaccaataaaaataaactagagaaacttagtactaataaggaactagaatcgtatagttctagccctcttcaagaacccattaggttaaatgattttctgggactattggaatgtgttaaaaagaatattcctctaacagatattccgacaaaggattgattactataaatggagaatgttcctaatgtatactttaatcctgtgtttatagagcccacgtttaaacattctttattaagtgtttataaacacagattaatagttttatttgaagtattcgttgtattcattctaatatatgtattttttagatctgaattaaatatgttcttcatgcctaaacgaaaaatacccgatcctattgatagattacgacgtgctaatctagcgtgtgaagacgataaattaatgatctatggattaccatggatgacaactcaaacatctgcgttatcaataaatagtaaaccgatagtgtataaagattgtgcaaagcttttgcgatcaataaatggatcacaaccagtatctcttaacgatgttcttcgcagatgatgattcattttttaagtatttggctagtcaagatgatgaatcttcattatctgatatattgcaaatcactcaatatctagactttctgttattattattgatccaatcaaaaaataaattagaagccgtgggtcattgttatgaatctctttcagaggaatacagacaattgacaaaattcacagactctcaagattttaaaaaactgtttaacaaggtccctattgttacagatggaagggtcaaacttaataaaggatatttgttcgactttgtgattagtttgatgcgattcaaaaaagaatcctctctagctaccaccgcaatagatcctattagatacatagatcctcgtcgcgatatcgcattttctaacgtgatggatatattaaagtcgaataaagtgaacaataattaattctttattgtcatcatgaacggcggacatattcagttgataatcggccccatgttttcaggtaaaagtacagaattaattagacgagttagacgttatcaaatagctcaatataaatgcgtgactataaaatattctaacgataatagatacggaacgggactatggacgcatgataagaataattttgaagcattggaagcaactaaactatgtgatgtcttggaatcaattacagatttctccgtgataggtatcgatgaaggacagttctttccagacattgttgaattctgtgagcgtatggcaaacgaaggaaaaatagttatagtagccgcactcgatgggacatttcaacgtaaaccgtttaataatattttgaatcttattccattatctgaaatggtggtaaaactaactgctgtgtgtatgaaatgctttaaggaggcttccttttctaaacgattgggtgaggaaaccgagatagaaataataggaggtaatgatatgtatcaatcggtgtgtagaaagtgttacatcgactcataatattatattttttatctaaaaaactaaaaataaacattgattaaattttaatataatacttaaaaatggatgttgtgtcgttagataaaccgtttatgtattttgaggaaattgataatgagttagattacgaaccagaaagtgcaaatgaggtcgcaaaaaaactgccgtatcaaggacagttaaaactattactaggagaattattttttcttagtaagttacagcgacacggtatattagatggtgccaccgtagtgtatataggatcggctcctggtacacatatacgttatttgagagatcatttctataatttaggaatgattatcaaatggatgctaattgacggacgccatcatgatcctattctaaatggattgcgtgatgtgactctagtgactcggttcgttgatgaggaatatctacgatccatcaaaaaacaactgcatccttctaagattattttaatttctgatgtaagatccaaacgaggaggaaatgaacctagtacggcggatttactaagtaattacgctctacaaaatgtcatgattagtattttaaaccccgtggcatctagtcttaaatggagatgcccgtttccagatcaatggatcaaggacttttatatcccacacggtaataaaatgttacaaccttttgctccttcatattcagctgaaatgagattattaagtatttataccggtgagaacatgagactgactcgagttaccaaatcagacgttgtaaattatgaaaaaaagatgtactaccttaataagatcgtccgtaacaaagtagttgttaactttgattatcctaatcaggaatatgactattttcacatgtactttatgctgaggaccgtgtactgcaataaaacatttcctactactaaagcaaaggtactatttctacaacaatctatatttcgtttcttaaatattccaacaacatcaactgaaaaagttagtcatgaaccaatacaacgtaaaatatctagcaaaaattctatgtctaaaaacagaaatagcaagagatccgtacgcggtaataaatagaaacgtactactgagatatactaccgatatagagtataatgatttagttactttaataaccgttagacataaaattgattctatgaaaactgtgtttcaggtatttaacgaatcatccataaattatactccggttgatgatgattatggagaaccaatcattataacatcgtatcttcaaaaaggtcataacaagtttcctgtaaattttctatacatagatgtggtaatatctgacttatttcctagctttgttagactagatactacagaaactaatatagttaatagtgtactacaaacaggcgatggtaaaaagactcttcgtcttcccaaaatgttagagacggaaatagttgtcaagattctctatcgccctaatataccattaaaaattgttagatttttccgcaataacatggtaactggagtagagatagccgatagatctgttatttcagtcgctgattaatcaattagtagagatgagataagaacattataataatcaataatatatcttatatcttatatcttatatcttgtttagaaaaatgctaatattaaaatagctaacgctagtaatccaatcggaagccatttgatatctataatagggtatctaatttcctgatttaaatagcggacagctatattctcggtagctactcgtttggaatcacaaacattatttacatctaatttactatctgtaatggaaacgtttcccaatgaaatggtacaatccgatacattgcattttgttatatttttttttaaagaggctggtaacaacgcatcgcttcgtttacatggctcgtaccaacaataatagggtaatcttgtatctattcctatccgtactatgcttttatcaggataaatacatttacatcgtatatcgtctttgttagcatcacagaatgcataaatttgttcgtccgtcatgataaaaatttaaagtgtaaatataactattatttttatagttgtaataaaaagggaaatttgattgtatactttcggttctttaaaagaaactgacttgataaaaatggctgtaatctctaaggttacgtatagtctatatgatcaaaaagagattaatgctacagatattatcattagtcatgttaaaaatgacgacgatatcggtaccgttaaagatggtagactaggtgctatggatggggcattatgtaagacttgtgggaaaacggaattggaatgtttcggtcactggggtaaagtaagtatttataaaactcatatagttaagcctgaatttatttcagaaattattcgtttactgaatcatatatgtattcactgcggattattgcgttcacgagaaccgtattccgacgatattaacctaaaagagttatcgggacacgctcttaggagattaaaggataaaatattatccaagaaaaagtcatgttggaacagcgaatgtatgcaaccgtatcaaaaaattactttttcaaagaaaaaggtttgtttcgtcaacaagttggatgatattaacgttcctaattctctcatctatcaaaagttaatttctattcatgaaaagttttggccattattagaaattcatcaatatccagctaacttattttatacagactactttcccatccctccgctgattattagaccggctattagtttttggatagatagtatacccaaagagaccaatgaattaacttacttattaggtatgatcgttaagaattgtaacttgaatgctgatgaacaggttatccagaaggcggtaatagaatacgatgatattaaaattatttctaataacacttccagtatcaatttatcatatattacatccggcaaaaataatatgattagaagttatattgtcgcccgacgaaaagatcagaccgctagatctgtaattggtcccagtacatctatcaccgttaatgaggtaggaatgcccgcatatattagaaatacacttacagaaaagatatttgttaatgcctttacagtggataaagttaaacaactattagcgtcaaaccaagttaaattttactttaataaacgattaaaccaattaacaagaatacgccaaggaaagtttattaaaaataaaatacatttattgcctggtgattgggtagaagtagctgttcaagaatatacaagtattatttttggaagacagccgtctctacatagatacaacgtcatcgcttcatctatcagagctaccgaaggagatactatcaaaatatctcccggaattgccaactctcaaaatgctgatttcgacggagatgaagaatggatgatattggagcaaaatcctaaagccgtaattgaacaaagtattcttatgtatccgacgacgttactcaaacacgatattcatggagcccccgtttatggatctattcaagatgaaatcgtagcagcgtattcattgtttagaatacaagatctttgtttagatgaagtattgaacatcttggggaaatatggaagaaagttcgatcctaaaggtaaatgtaaattcagcggtaaagatatctatacttacttgataggtgaaaagattaattatccgggtctcttaaaggatggtgaaattattgcaaacgacgtagatagtaattttgttgtggctatgaggcatctgtcattggctggactcttatccgatcataagtcgaacgtggaaggtatcaactttattatcaagtcatcttatgtttttaagagatatctatctatttacggttttggggtgacattcaaagatctgagaccaaattcgacgttcactaataaattggaggccatcaacgtagaaaaaatagaacttatcaaagaagcatacgccaaatatctcaacgatgtaagagacgggaaaatagttccattatctaaagctttagaggcggactatgtggaatccatgttatccaacttgacaaatcttaatatccgagagatagaagaacatatgagacaaacgctgatagatgatccagataataacctcctgaaaatggccaaagcgggttataaagtaaatcccacagaactaatgtatattctaggtacttatggacaacagaggattgatggtgaaccagcagagactcgagtattgggtagagtcttaccttactatcttccagactctaaggatccagaaggaagaggttatattcttaattctttaacaaaaggattaacaggttctcaatattacttttcgatgctggttgccagatctcaatctactgatatcgtctgtgaaacatcacgtaccggaacactggctagaaaaatcattaaaaagatggaggatatggtggtcgacggatacggacaagtagttataggtaatacgctcatcaagtacgccgccaattataccaaaattctaggctcagtatgtaaacctgtagatcttatctatccagatgagtccatgacttggtatttggaaattagtgctctgtggaataaaataaaacagggattcgtttactctcagaaacagaaacttgcaaaaaagacattggcgccgtttaatttcctagtattcgtcaaacccaccactgaggataatgctattaaggttaaggatctgtacgatatgattcataacgtcattgatgatgtgagagagaaatacttctttacggtatctaatatagattttatggagtatatattcttgacgcatcttaatccttctagaattagaattacaaaagaaacggctatcactatctttgaaaagttctatgaaaaactcaattatactctaggtggtggaactcctattggaattatttctgcacaggtattgtctgagaagtttacacaacaagccctgtccagttttcacactactgaaaaaagtggtgccgtcaaacaaaaacttggtttcaacgagtttaataacctgactaatttgagtaagaataagaccgaaattatcactctggtatccgatgatatctctaaacttcaatctgttaagattaatttcgaatttgtatgtttgggagaattaaatccaaacatcactcttcgaaaagaaacagataggtatgtagtagatataatagtcaatagattatacatcaagagagcagaaattaccgaattagtcgtcgaatatatgattgaacgatttatctcctttagcgtcattgtaaaggaatggggtatggagacattcattgaggacgaggataatattagatttactgtctacctaaatttcgttgaaccggaagaattgaatcttagtaagtttatgatggttcttccgggtgccgccaacaagggcaagattagtaaattcaagattcctatctctgactatacgggatatgacgacttcaatcaaacaaaaaagctcaataagatgactgtagaactcatgaatctaaaagaattgggttctttcgatttggaaaacgtcaacgtgtatcctggagtatggaatacatacgatatcttcggtatcgaggccgctcgtgaatacttgtgcgaagccatgttaaacacctatggagaagggttcgattatctgtatcagccttgtgatcttctcgctagtttactatgtgctagttacgaaccagaatcagtgaataaattcaagttcggcgcagctagtactcttaagagagctacgttcggagacaataaagcattgttaaacgcggctcttcataaaaagtcagaacctattaacgataatagtagctgccacttttttagcaaggtccctaatataggaactggatattacaaatactttatcgacttgggtcttctcatgagaatggaaaggaaactatctgataagatatcttctcaaaagatcaaggaaatggaagaaacagaagacttttaattcttatcaataacatatttttctatgatctgtcttttaaacgatggattttccacaaatgcgcctctcaagtccctcatagaatgatacacgtataaaaaatatagcataggcgatgactccttatttttagacattagatatgccaaaatcatagccccgcttctatttactcccgcagcacaatgaaccaacacgggctcgtttcgttgatcacatttagataaaaaggcggtcacgtcgtcaaaatatttactaatatcggtagttgtatcatctaccaacggtatatgaataatattaatattagagttaggcaatgtatatttatccatcgtcaaatttaaaacatatttgaacttaacttcagatgatggtgcatccatagcatttttataatttcccaaatacacattattggttacccttgtcattatagtgggagatttggctttgtgcatatctccagttgaacgtagtagtaagtatttatacaaacttttcttatccatttataacgtacaaatggataaaactactttatcggtaaacgcgtgtaatttagaatacgttagagaaaaggctatagtaggcgtacaagcagccaaaacatcaacacttatattctttgttattatattggcaattagtgcgctattactctggtttcagacgtctgataatccagtctttaatgaattaacgagatatatgcgaattaaaaatacggttaacgattggaaatcattaacggatagcaaaacaaaattagaaagtgatagaggtaaacttctagccgctggtaaggatgatatattcgaattcaaatgtgtggatttcggcgcctattttatagctatgcgattggataagaaaacatatctgccgcaagctattaggcgaggtactggagacgcgtggatggttaaaaaggcggcaaaggtcgatccatctgctcaacaattttgtcagtatttgataaaacacaagtctaataatgttattacttgtggtaatgagatgttaaatgaattaggttatagcggttattttatgtcaccgcattggtgttccgattttagtaatatggaatagtgttagataaatgcggtaacaaatgttcctgtaaggaaccataacagcttagatttaacgttaaagatgagcataaacataataaacaaaattacaatcaaacctataacattaatatcaaacaatccaaaaaatgaaatcagtggagtagtaaacgcgtacataactcctggataacgtttagcagctgccgttcctattctagaccaaaaattcggtttcatgttttcgaagcggtgttctgcaacaagtcggggatcgtgttctacatatttggcggcattatccagtatctgcctattgatcttcatttcgttttcgattctggctatttcaaaataaaatcccgatgatagacctccagactttataatttcatctacgatgttcagcgccgtagtaactctaataatataggctgataagctaacatcataccctcctgtatatgtgaatatggtatgatttttgtccattacaagctcggttttaactttattgcctgtaataatttctctcatctgtaggatatctatttttttgtcatgcattgccttcaagacgggacgaagaaacgtaatatcctcaataacgttatcgttttctacaataactacatattctacctttttattttctaactcggtaaaaaaattagaatcccatagggctaaatgtctagcgatatttcttttcgtttcctctgtacacatagtgttacaaaaccctgaaaagaagtgagtatacttgtcatcatttctaatgtttcctccagtccactgtataaacgcataatccttgtaatgatctggatcatccttgactaccacaacatttcttttttctggcataacttcgttgtcctttacatcatcgaacttctgatcattaatatgctcatgaacattaggaaatgtttctgatggaggtctatcaataactggcacaacaataacaggagttttcaccgccgccatttagttattgaaattaatcatatacaactctttaatacgagttatattttcgtctatccattgtttcacatttacatatttcgacaaaaagatataaaatgcgtattccaatgcttctctgtttaatgaattactaaaatatacaaacacgtcactgtctggcaataaatgatatcttagaatattgtaacaatttattttgtattgcacatgttcgtgatctatgagttcttcttcgaatggcataggatctccgaatctgaaaacgtataaataggagttagaataataatatttgagagtattggtaatatataaactctttagcggtataattagtttttttctctcaatttctatttttagatgtgatggaaaaatgactaattttgtagcattagtatcatgaactctaatcaaaatcttaatatcttcgtcacacgttagctctttgaagtttttaagagatgcatcagttggttctacagatggagtaggtgcaacaattttttgttctacacatgtatgtactggagccattgttttaactataatggtgcttgtatcgaaaaactttaatgcagatagcggaagctcttcgccgcgactttctacatcgtaattgggttctaacgccgatctctgaatggatactagttttctaagttctaatgtgattctctgaaaatgtaaatccaattcctccggcattatagatgtgtatacatcggtaaataaaactatagtatccaacgatcccttctcgcaaattctagtcttaaccaaaaaatcgtatataaccacggagatggcgtatttaagagtggattcttctaccgttttgttcttggatgtcatataggaaactataaagtccgcactactgttaagaatgattactaacgcaactatatagttcaaattaagcattttggaaacataaaataactctgtagacgatacttgactttcgaataagtttgcagacaaacgaagaaagaacagacctctcttaatttcagaagaaaactttttttcgtattcctgacgtctagagtttatatcaataagaaagttaagaattagtcggttaatgttgtatttcattacccaagtttgagatttcataatattatcaaaagacatgataatattaaagataaagcgctgactatgaacgaaatagctatatggttcgctcaaaaatatagtcttgttaaacgtggaaacgataactgtatttttaatcacgtcagcggcatctaaattaaatataggtatatttattccacacactctacaatatgccacaccatcttcataataaataaattcgttagcaaaattattaattttagtgaaatagttagcgtcaactttcatagcttccttcaatctaatttgatgctcacacggtgcgaattctactctaacatcccttttccatgcctcaggttcatcgatctctataatatctagttttttgcgtttcacaaacacaggctcgtctctcgcgatgagatctgtatagtaactatgtaaatgataactagatagaaagatgtagctatatagatgacgatcctttaagagaggtataataactttaccccaatcagatagactgttgttatggtcttcggaaaaagaatttttataaatttttccagtattttccaaatatacgtacttaacatctaaaaaatccttaatgataataggaatggataatccgtctattttataaagaaatacatatcgcacattatacttttttttggaaatgggaataccgatgtgtctacataaatatgcaaagtctaaatattttttagagaatcttagttggtccaaattcttttccaagtacggtaatagatttttcatattgaacggtatcttcttaatctctggttctagttccgcattaaatgatgaaactaagtcactatttttataactaacgattacatcacctctaacatcatcatttaccagaatactgatcttcttttgtcgtaaatacatgtctaatgtgttaaaaaaaagatcatacaagttatacgtcatttcatctgtggtattcttgtcattgaaggataaactcgtactaatctcttctttaacagcctgttcaaatttatatcctatatacgaaaaaatagcaaccagtgtttgatcatccgcgtcaatattctgttctatcgtagtgtataacaatcgtatatcttcttctgtgatagtcgatacgttataaaggttgataacgaaaatatttttatttcgtgaaataaagtcatcgtaggattttggacttatattcgcgtctagtagatatgcttttatttttggaatgatctcaattagaatagtctctttagagtccatttaaagttacaaacaactaggaaattggtttatgatgtataatttttttagtttttatagattctttattctatacttaaaaaatgaaaataaatacaaaggttcttgagggttgtgttaaattgaaagcgagaaataatcataaattatttcattatcgcgatatccgttaagtttgtatcgtaatggcgtggtcaattacaaataaagcggatactagtagcttcacaaagatggctgaaatcagagctcatctaaaaaatagcgctgaaaataaagataaaaacgaggatattttcccggaagatgtaataattccatctactaagcccaaaaccaaacgagccactactcctcgtaaaccagcggctactaaaagatcaaccaaaaaggaggaagtggaagaagaagtagttatagaggaatatcatcaaacaactgaaaaaaattctccatctcctggagtcggcgacattgtagaaagcgtggctgctgtagagctcgatgatagcgacggggatgatgaacctatggtacaagttgaagctggtaaagtaaatcatagtgctagaagcgatctttctgacctaaaggtggctaccgacaatatcgttaaagatcttaagaaaattattactagaatctctgcagtatcgacggttctagaggatgttcaagcagctggtatctctagacaatttacttctatgactaaagctattacaacactatctgatctagtcaccgagggaaaatctaaagttgttcgtaaaaaagttaaaacttgtaagaagtaaatgcgtgcacttttttataaagatggtaaactctttaccgataataattttttaaatcctgtatcagacgataatccagcgtatgaggttttgcaacatgttaaaattcctactcatttaacagatgtagtagtatatgaacaaacgtgggaagaggcattaactagattaatttttgtgggaagcgattcaaaaggacgtagacaatacttttacggaaaaatgcatgtacagaatcgcaacgctaaaagagatcgtatttttgttagagtatataacgttatgaaacgaattaattgttttataaacaaaaatataaagaaatcgtccacagattccaattatcagttggcggtttttatgttaatggaaactatgttttttattagatttggtaaaatgaaatatcttaaggagaatgaaacagtagggttattaacactaaaaaataaacacatagaaataagtcccgatgaaatagttatcaagtttgtaggaaaggacaaagtttcacatgaatttgttgttcataagtctaatagactatataaaccgctattgaaactgacggatgattctagtcccgaagaatttctgttcaacaaactaagtgaacgaaaggtatacgaatgtatcaaacagtttggtattagaatcaaggatctccgaacgtatggagtcaattatacgtttttatataatttttggacaaatgtaaagtccatatctcctcttccgtcaccaaaaaagttaatagcgttaactatcaaacaaactgctgaagtggtaggtcatactccatcaatttcaaaaagagcttacatggcaacgactattttagaaatggtaaaggataaaaattttttagatgtagtatctaaaactacgttcgatgaattcctatctatagtcgtagatcacgttaaatcatctacggatggatgatatagatctttacacaaataattacaagaccgataaatggaaatggataagcgtataaaatctctcgcaatgacagctttcttcggagagctaaacacattagatattatggcattgataatgtctatatttaaacgccatccaaacaataccattttttcagtggataaggatggtcagtttatgattgatttcgaatacgataattataaggcttctcaatatttggatctgaccctcactccgatatctggagatgaatgcaagactcacgcatcgagtatagccgaacaattggcgtgtgcggatattattaaagaggatattagcgaatatatcaaaactactccccgtcttaaacgatttataaaaaaataccgcaatagatcagatactcgcatcagtcgagatacagaaaagcttaaaatagctctagctaaaggcatagattacgaatatataaaagacgcttgttaataagtaaatgaaaaaaaactagtcgtttataataaaacacgatatggatgccaacgtagtatcatcttctactattgcaacgtatatagacgctttagcgaagaatgcttcagaattagaacagaggtctaccgcatacgaaataaataatgaattggaactagtatttattaagccgccattaattactttgacaaatgtagtgaatatctctacgattcaggaatcgtttattcgatttaccgttactaataaggaaggtgttaaaattagaactaagattccattatctaaggtacatggtctagatgtaaaaaatgtacagttagtagatgctatagataacatagtttgggaaaagaaatcattagtgacggaaaatcgtcttcacaaagaatgcttgttgagactatcgacagaggaacgtcatatatttttggattacaagaaatatggatcctctatccgactagaattagtcaatcttattcaagcaaaaacaaaaaactttacgatagactttaagctaaaatattttctaggatccggtgcccagtctaaaagttctttattacacgctattaatcatccaaagtcaaggcctaatacatctctggaaatagaattcacacctagagacaatgaaaaagttccatatgatgaactaataaaggaattgacgactctatcacgtcatatatttatggcttctccagagaatgtaattctttctccgcctattaacgcacctataaagacttttatgttgcctaaacaagatatagtaggtctggatctggaaaatctatacgctgtaactaagactgacggcattcctataactatcagagttacatcaaacgggttgtattgttattttacacatcttggttatattattagatatcctgttaagagaataatagattccgaagtagtagtctttggtgaggcagttaaggataagaactggaccgtatatctcattaagctaatagagcctgtgaatgcaatcaatgatagactagaagaaagtaagtatgttgaatctaaactagtggatatttgtgatcggatagtattcaagtcaaagaaatacgaaggtccgtttactacaactagtgaagtcgtcgatatgttatctacatatttaccaaagcaaccagaaggtgttattctgttctattcaaagggacctaaatctaacattgattttaaaattaaaaaggaaaatactatagaccaaactgcaaatgtagtatttaggtacatgtccagtgaaccaattatctttggagaatcgtctatctttgtagagtataagaaatttagcaacgataaaggctttcctaaagaatatggttctggtaagattgtgttatataacggcgttaattatctaaataatatctattgtttggaatatattaatacacataatgaagtgggtattaagtccgtggttgtacctattaagtttatagcagaattcttagttaatggagaaatacttaaacctagaatcgataaaaccatgaaatatattaactcagaagattattatggaaatcaacataatatcatagtcgaacatttaagagatcaaagcatcaaaataggagatatctttaacgaggataaactatcggatgtgggacatcaatacgccaataatgataaatttagattaaatccagaagttagttattttacgaataaacgaactagaggaccgttgggaattttatcaaactacgtcaagactcttcttatttctatgtattgttccaaaacatttttagacgattccaacaaacgaaaggtattggcgattgattttggaaacggtgctgacctggaaaaatacttttatggagagattgcgttattggtagcgacggatccggatgctgatgctatagctagaggaaatgaaagatacaacaaattaaactctggaattaaaaccaagtactacaaatttgactacattcaggaaactattcgatccgatacatttgtctctagtgtcagagaagtattctattttggaaagtttaatatcatcgactggcagtttgctatccattattcttttcatccgagacattatgctaccgtcatgaataacttatccgaactaactgcttctggaggcaaggtattaatcactaccatggacggagacaaattatcaaaattaacagataaaaagacttttataattcataagaatttacctagtagcgaaaactatatgtctgtagaaaaaatagctgatgatagaatagtggtatataatccatcaacaatgtctactccaatgactgaatacattatcaaaaagaacgatatagtcagagtgtttaacgaatacggatttgttcttgtagataacgttgatttcgctacaattatagaacgaagtaaaaagtttattaatggcgcatctacaatggaagatagaccgtctacaaaaaactttttcgaactaaatagaggagccattaaatgtgaaggtttagatgtcgaagacttacttagttactatgttgtttatgtcttttctaagcggtaaataataatatggtatgggttctgatatccccgttctaaatgcattaaataattccaatagagcgatttttgttcctataggaccttccaactgtggatactctgtattgttaatagatatattaatacttttgtcgggtaacagaggttctacgtcttctaaaaataaaagtttgataacatctggcctgttcataaataaaaacttggcgattctatatatactcttattatcaaatctagccattgtcttatagatgtgagctactgtaggtgtaccatttgattttctttctaatactatatatttctctcgaagaagttcttgcacatcatctgggaataaaatactactgttgagtaaatcagttattttttttatatcgatattgatggacatttttatagttaaggataataagtatcccaaagtcgataacgacgataacgaagtatttatacttttaggaaatcacaatgactttatcagattaaaattaacaaaattaaaggagcatgtatttttttctgaatatattgtgactccagatacatatggatctttatgcgtcgaattaaatgggtctagttttcagcacggtggtagatatatagaggtggaggaatttatagatgctggaagacaagttagatggtgttctacatccaatcatatatctgaagatatacccgaagatatacacactgataaatttgtcatttatgatatatacacttttgacgctttcaagaataaacgattggtattcgtacaggtacctccgtcgttaggagatgatagtcatttgactaatccgttattgtctccgtattatcgtaattcagtagccagacaaatggtcaatgatatgatttttaatcaagattcatttttaaaatatttattagaacatctgattagaagccactatagagtttctaaacatataacaatagttagatacaaggataccgaagaattaaatctaacgagaatatgttataatagagataagtttaaggcgtttgtattcgcttggtttaacggcgtttcggaaaatgaaaaggtactagatacgtataaaaaggtatctaatttgatataatgaattcagtgactgtatcacacgcgccatatactattacttatcacgatgattgggaaccagttatgagtcaattggtagagttttataacgaagtagccagttggctgctacgagacgagacgtcgcctattcctgataagttctttatacagttgaaacaaccgcttagaaataaacgagtatgtgtgtgtggtatagatccgtatccgaaagatggaactggtgtaccgttcgaatcaccaaattttacaaaaaaatcaattaaggagatagcttcatctatatctagattaaccggagtaattgattataaaggttataaccttaatataatagacggggttataccctggaattattacttaagttgtaaattaggagaaacaaaaagtcacgcgatctactgggataagatttccaagttactgctgcagcatataactaaacacgttagtgttctttattgtttgggtaaaacagatttctcgaatatacgggcaaagttagaatccccggtaactaccatagtgggatatcatccagcggctagagaccgccaattcgagaaagatagatcatttgaaattatcaacgttttactggaattagacaacaaggtacctataaattgggctcaagggtttatttattaatgctttagtgaaattttaacttgtgttctaaatggatgcggctattagaggtaatgatgttatctttgtccttaagactataggtgtcccatcagcatgtagacaaaatgaagatccaagattcgtagaagcatttaaatgcgacgagttaaaaagatatattgataataatccagaatgtacactattcgaaagtcttagggatgaggaagcatactctatagtcagaattttcatggatgtagatttagacgcgtgtctagacgaaatagattatttaacggctattcaagattttattatcgaggtgtcaaactgtgtagctagattcgcgtttacagaatgcggtgccattcatgaaaatgtaataaaatccatgagatctaatttttcattgactaagtctacaaatagagataaaacaagttttcatattatctttttagacacgtataccactatggatacattgatagctatgaaacgaacactattagaattaagtagatcatctgaaaatccactaacaagatcgatagacactgccgtatataggagaaaaacaactcttcgggttgtaggtactaggaaaaatccaaattgcgacactattcatgtaatgcaaccaccgcatgataatatagaagattacctattcacttacgtggatatgaacaacaatagttattacttttctctacaacgacgattggaggatttagttcctgataagttatgggaaccagggtttatttcattcgaagacgctataaaaagagtttcaaaaatattcattaattctataataaactttaatgatctcgatgaaaataattttacaacggtaccactggtcatagattacgtaacaccttgtgcattatgtaaaaaacgatcgcataaacatccgcatcaactatcgttggaaaatggtgctattagaatttacaaaactggtaatccacatagttgtaaagttaaaattgttccgttggatggtaataaactgtttaatattgcacaaagaattttagacactaactctgttttattaaccgaacgaggagactatatagtttggattaataattcatggaaatttaacagcgaagaacccttgataacaaaactaattctgtcaataagacatcaactacctaaggaatattcaagcgaattactctgtccgaggaaacgaaagactgtagaagctaacatacgagacatgttagtagattcagtagagaccgatacctatccggataaacttccgtttaaaaatggtgtattggacctggtagacggaatgttttactctggagatgatgctaaaaaatatacgtgtactgtatcaaccggatttaaatttgacgatacaaagttcgtcgaagacagtccagaaatggaagagttaatgaatatcattaacgatatccaaccattaacggatgaaaataagaaaaatagagagctatatgaaaaaacattatctagttgtttatgtggtgctaccaaaggatgtttaacattcttttttggagaaactgcaactggaaagtcgacaaccaaacgtttgttaaagtctgctatcggtgacctgtttgttgagacgggtcaaacaattttaacagatgtattggataaaggacctaatccatttatcgctaacatgcatttgaaaagatctgtattctgtagcgaactacctgattttgcctgtagtggatcaaagaaaattagatctgataatattaaaaagttgacagaaccttgtgtcattggaagaccgtgtttctccaataaaattaataatagaaaccatgctacaatcattatcgatactaattacaaacctgtctttgataggatagataacgcattaatgagaagaattgccgtcgtgcgattcagaacacacttttctcaaccttctggtagagaggctgctgaaaataatgacgcgtacgataaagtcaaactattagacgaggggttagatggtaaaatacaaaataatagatatagatttgcatttctatacttgttggtgaaatggtacaaaaaatatcatgttcctattatgaaactatatcctacacccgaagagattcctgactttgcattctatctcaaaataggtactctgttagtatctagctctgtaaagcatattccattaatgacggacctctccaaaaagggatatatattgtacgataatgtggttactcttccgttgactactttccaacagaaaatatccaagtattttaattctagactatttggacacgatatagagagcttcatcaatagacataagaaatttgccaatgttagtgatgaatatctgcaatatatattcatagaggatatttcatctccgtaaatatatgctcatatatttatagaagatatcacatatctaaatgaataccggaattatagatttatttgataatcatgttgatagtataccaactatattacctcatcagttagctactctagattatctagttagaactatcatagatgagaacagaagcgtgttattgttccatattatgggatcaggtaaaacaataatcgctttgttgttcgccttggtagcttccagatttaaaaaggtttacattctagtgccgaacatcaacatcttaaaaattttcaattataatatgggtgtagctatgaacttgtttaatgacgaattcatagctgagaatatctttattcattccacaacaagtttttattctcttaattataacgataacgtcattaattataacggattatctcgctacaataactctatttttatcgttgatgaggcacataatatctttgggaataatactggagaacttatgaccgtgataaaaaataaaaacaagattccttttctactattgtctggatctcccattactaacacacctaatactctgggtcatattatagatttaatgtccgaagagacgatagattttggtgaaattattagtcgtggtaagaaagtaattcagacacttcttaacgaacgaggtgtgaatgtacttaaggatttgcttaaaggaagaatatcatattacgaaatgcctgataaagatctaccaacgataagatatcacggacgtaagtttctagatactagagtagtatattgtcacatgtctaaacttcaagagagagattatatgattactagacgacagctatgttatcatgaaatgtttgataaaaatatgtataacgtgtcaacggcagtattgggacaacttaatctgatgaataatttagatactttatttcaggaacaggataaggaattgtacccaaatctgaaaataaataatggcgtgttatacggagaagaattggtaacgttaaacattagttccaaatttaagtactttatcaatcggatacagacactcaacggaaaacattttatatacttttctaattctacatatggtggattggtaattaaatatatcatgctcagtaatggatattctgaatataatggttctcagggaactaatccacatatgataaacggcaaaccaaaaacatttgctatcgttactagtaaaatgaaatcgtctttagaggatctattagatgtgtataattctcctgaaaacgatgatggtagtcaattgatgtttttgttttcatcaaacattatgtccgaatcctatactctgaaagaggtaaggcatatttggtttatgactatcccagatactttttctcaatacaaccaaattcttggacgatctattagaaaattctcttacgccgatatttctgaaccagttaatgtatatcttttagccgccgtatattccgatttcaatgacgaagtaacgtcattaaacgattacacacaggatgaattaattaatgttttaccatttgacatcaaaaagctgttgtatctaaaatttaagacgaaagaaacgaatagaatatactctattcttcaagagatgtctgaaacgtattctcttccaccacatccatcaattgtaaaagttttattgggagaattggtcagacaatttttttataataattctcgtattaagtataacgactccaagttacttaaaatggttacatcagttataaaaaataaagaagacgctaggaattacatagatgatattgtaaacggtcacttctttgtatcgaataaagtatttgataaatctcttttatacaaatacgaaaacgatattattacagtaccgtttagactttcctacgaaccatttgtttggggagttaactttcgtaaagaatataacgtggtatcttctccataaaactgatgagatatataaagaaataaatgtcgagctttgttaccaatggatacctttccgttacattggaacctcatgagctgacgttagacataaaaactaatattaggaatgccgtatataagacgtatctccatagagaaattagtggtaaaatggccaagaaaatagaaattcgtgaagacgtggaattacctctcggcgaaatagttaataattctgtagttataaacgttccgtgtgtaataacctacgcgtattatcacgttggggatatagtcagaggaacattaaacatcgaagatgaatcaaatgtaactattcaatgtggagatttaatctgtaaactaagtagagattcgggtactgtatcatttagcgattcaaagtactgcttttttcgaaatggtaatgcgtatgacaatggcagcgaagtcactgccgttctaatggaggctcaacaaggtatcgaatctagttttgtttttctcgcgaatatcgtcgactcataagaaagagaatagcggtaagtataaacacgaatactatggcaataattgcgaatgttttattcccttcgatatatttttgataatatgaaaaacatgtctctctcaaatcggacaaccatctcataaaatagttctcgcgcgctggagaggtagttgctgctcgtataatctccccagaataatatacttgcgtgtcgtcgttcaatttatacggatttctatagttctctgttatataatacggttttccatcatgattagacgacgacaatagtgttctaaatttagatagttgatcagaatgaatgtttattggcgttggaaaaattatccatacagcgtctgcagagtgcttgatagttgttcctagatatgtaaaataatccaacgtactaggtagcaaattgtctagataaaatactgaatcaaacggcgcagacgtattagcggatctaatggaatccaattgattgactatcttttgaaaatatacatttttatgatccgatacttgtaagaatatagaaataatgataagtccatcatcgtgtttttttgcctcttcataagaactatattttttcttattccaatgaacaagattaatctctccagagtatttgtacacatctatcaagtgattggatccataatcgtcttcctttccccaatatatatgtagtgatgataacacatattcattggggagaaaccctccacttatatatcctcctttaaaattaatccttactagttttccagtgttctggatagtggttggtttcgactcattataatgtatgtctaacggcttcaatcgcgcgttagaaattgcttttttagtttctatattaataggagatagttgttgcggcatagtaaaaatgaaatgataactgtttaaaaatagctcttagtatgggaattacaatggatgaggaagtgatatttgaaactcctagagaattaatatctattaaacgaataaaagatattccaagatcaaaagacacgcatgtgtttgctgcgtgtataacaagtgacggatatccgttaataggagctagaagaacttcattcgcgttccaggcgatattatctcaacaaaattcagattctatctttagagtatccactaaactattacggtttatgtactacaatgaactaagagaaatctttagacggttgagaaaaggttctatcaacaatatcgatcctcacttcgaagagttaatattattgggtggtaaactagataaaaaggaatctattaaagattgtttaagaagagaattaaaagaggaaagtgatgaacgtataacagtaaaagaatttggaaatgtaattctaaaacttacaacacgggataaattatttaataaagtatatataagttattgcatggcgtgttttattaatcaatcgttggaggatttatcgcatactagtatttacaatgtagaaattagaaagattaaatcattaaatgattgtattaacgacgataaatacgaatatctgtcttatatttataatatgctagttaatagtaaatgaacttttacagatctagtataattagtcagattattaagtataatagacgactagctaagtctattatttgcgaggatgactctcaaattattacactcacggcattcgttaaccaatgcctatggtgtcataaacgagtatccgtgtccgctattttattaactactgataacaaaatattagtatgtaacagacgagatagttttctctattctgaaataattagaactagaaacatgtttagaaagaaacgattatttctgaattattccaattatttgtccaaacaggaaagaagtatactatcgtcatttttttctctatatccagctactgctgataatgatagaatagatgctatttatccgggtggcatacccaaaaggggtgagaatgttccagagtgtttatccagggaaattaaagaagaagttaatatagacaattcttttgtattcatagacactcggttttttattcatggcatcatagaagataccattattaataaattttttgaggtaatcttctttgtcggaagaatatctctaacgagtgatcaaatcattgatacatttaaaagtaatcatgaaatcaaggatctaatatttttagatccgaattcaggtaatggactccaatacgaaattgcaaaatatgctctagatactgcaaaactcaaatgttatggccatagaggatgttattacgaatcattaaaaaaattaactgaggatgattgattagaaaatataaattaatttaccatcgtgtatttttataacgggattgtccggcatatcatgtagatagttaccgtctacatcgtatactcgaccatctacgcctttaaatcctctatttattgacattaatctattagaattggaataccaaatattagtaccctcaattagtttattggtaatattttttttagacgatagatcgatggctcttgaaaccaaggttttccaaccggactcattgtcgatcggtgagaagtctttttcattagcatgaatccattctaatgatgtatgtttaaacactctaaacaattggacaaattcttttgatttgctttgaatgatttcaaataggtcttcgtctacagtaggcataccattagataatctagccattataaagtgcacgtttacatatctacgttctggaggagtaagaacgtgactattgagacgaatggctcttcctactatctgacgaagagacgcctcgttccaagtcatatctagaatgaagatatcattgattgagaagaagctaataccctcgcctccactagaagagaatacgcatgttttaatgcattctccgttagtgtttgattcttggttaaactcagccaccgccttgattctagtatcttttgttctagatgagaactctatattagagataccaaagactttgaaatatagtaataagatttctattcctgactgattaacaaatggttcaaagactagacatttaccatgggatgctaatattcccaaacatacatctataaatttgacgcttttctcttttaattcagtaaatagagagatatcagccgcactagcatcccctttcaatagttctccctttttaaaggtatctaatgcggatttagaaaactctctatttcttaatgaatttttaaaatcattatatagtgttgctatctcttgcgcgtattcgcccggatcacgattttgtctttcaggaaagctatcgaacgtaaacgtagtagccatacgtctcagaattctaaatgatgatatacctgtttttatttcagcgagtttagccttttgataaatttcttcttgctttttcgacatattaacgtatcgcattaatactgttttcttagcgaatgatgcagacccttctacgtcatcaaaaatagaaaactcgttattaactatgtacgaacataggcctcctagtttggagactaattctttctcatcaactagacgtttattctcaaatagcgattggtgttgtaaggatcctggtcgtagtaagttaaccaacatggtgaattcttgcacactattgacgataggtgtagccgataaacaaatcatcttatggttttttaacgcaatggttttagataaaaaattatatactgaacgagtaggacggatcttaccatcttctttgattaatgatttagaaatgaagttatgacattcatcaataatgacgcatattctactcttggaattaatagttttgatattagtaaaaaatttatttctaaaattttgatcatcgtaattaataaaaatacaatccttcgttatctctggagcgtatctgagtatagtgttcatccaaggatcttctatcaaagcctttttcaccaataagataatagcccaattcgtataaatatccttaagatgtttgagaatatatacagtagtcattgttttaccgacacccgtttcatggaacaataaaagagaatgcatactgtctaatcctaagaaaactcttgctacaaaatgttgataatccttgaggcgtactacgtccgaccccatcatttcaacaggcatattagtagttctgcgcaatgcataatcgatataggccgcgtgtgatttactcatttatgagtgataagtaataactatgttttaaaaatcacagcagtagtttaactagtcttctctgatgtttgttttcgatacttttcgaatcagaagtcatactagaataaagcagcgagtgaacgtaatagagagcttcgtatactctattcgaaaactctaagaacttattaatgaattccgtatccactggatcgtttaaaatactaaattgaacactgttcacatccttccaagaagaagacttagtgacggacttaacatgagacataaataaatccaaattttttttacaaacatcactagccaccataatggcgctatctttcaaccagctatcgcttacgcattttagcagtctaacatttttaaagagactacaatatattctcatagtatcgattacacctctaccgaataaagttggaagtttaataatacaatatttttcgtttacaaaatcaaataatggtcgaaacacgtcgaaggttaacatcttataatcgctaatgtatagattgttttcagtgagatgattattagatttaatagcatctcgttcacgtttgaacagtttattgcgtgcgctgaggtcggcaactacggcgtccgctttagtactcctcccataatactttacgctattaatctttaaaatttcatagactttatctagatcgctttctggtaacatgatatcatgtgtaaaaagttttaacatgtcggtcggcattctatttagatcattaactctagaaatctgaagaaagtaattagctccgtattccagactaggtaatgggcttttacctagagacagattaagttctggcaatgtttcataaaatggaagaaggacatgcgttccctcccggatattttttacaatttcatccatttacaactctatagtttgttttcattattattagttattatctcccataatcttggtaatacttaccccttgatcgtaagataccttatacaggtcattacatacaactaccaattgtttttgtacataatagattggatggttgacatccatggtggaataaactactcgaacagatagtttatctttccccctagatacattggccgtaatagttgtcggcctaaagaatatctttggtgtaaagttaaaagttagggttcttgttccattattgctttttgtcagtagttcattataaattctcgagatgggtccgttctctgaatatagaacatcatttccaaatctaacttctagtctagaaataatatcggtcttattcttaaaatctattcccttgatgaagggatcgttaatgaacaaatccttggcctttgattcggctgatctattatctccgttatagacgttacgttgactagtccaaagacttacaggaatagatgtatcgatgatgttgatactatgtgatatgtgagcaaagattgttctcttagtggcatcactatatgttccagtaatggcggaaaactttttagaaatgttatatataaaagaattttttcgtgttccaaacattagcagattagtatgaagataaacactcatattatcaggaacattatcaatttttacatacacatcagcatcttgaatagaaacgataccatcttctggaacctctacgatctcggcagactccggataaccagtcggtgggccatcactaacaataactagatcatccaacaatctactcacatatgcatctatataatctttttcatcttgtgagtaccctggatacgaaataaatttattatccgtatttccataataaggtttagtataaacagagagcgatgttgccgcatgaacttcagttacagtcgccgttggttggtttatttgacctattactctcctaggtttctctataaacgatggtttaatttgtacattcttaaccatatatccaataaagctcaattcaggaacataaacaaattctttgttgaacgtttcaaagtcgaacgaagagtcacgaataacgatatcggatactggattgaaggttaccgttacggtaatttttgaatcggatagtttaagactgctgaatgtatcttccacatcaaacggagttttaatataaacgtatactgtagatggttctttaatagtgtcattaggagttaggccaatagaaatatcattaagttcactagaatatccagagtgtttcaaagcaattgtattattgatacaattattatataattcttcgccctcaatttcccaaataacaccgttacacgaagagatagatacgtgattaatacatttatatccaacatatggtacgtaaccgaatcttcccatacctttaacttctggaagttccaaactcagaaccaaatgattaagcgcagtaatatactgatccctaatttcgaagctagcgatagcctgattgtctggaccatcgtttgtcataactccggatagagaaatatattgcggcatatataaagttggaatttgactatcgactgcgaagacattagaccgtttaatagagtcatccccaccgatcaaagaattaatgatagtattattcattttctatttaaaatggaaaaagcttacaataaactccgtagagaaatatctataatttgtgagttttccttaaagtaacagcttccgtaaacgccgtctttatctcttagtaagtttattgtatttataaccttttccttatcttcatagaatactaaaggcaacaaagaaatttttggttcttctctaagagctacgtgagacttaaccatagaagccaacgaatccctacatattttagaacagaaataccctacttcaccacccttgtatgtctcaatactaataggtctaaaaaccaaatcttgattacaaaaccaacacttatcaattacactatttgtcttaatagacacatctgccatagatttataatactttggtagtatacaagcgagtgcttcttctttagcgggcttaaagactgctttaggtgctgaaataaccacatctggaaggcttactcgcttagccatttaattacggaactatttttttatacttctaatgagcaagtagaaaacctctcatctacaaaaacgtactcgtgtccataatcctctaccatagtaacacgttttttagatctcatatgtgctaaaaagttttcccatactaattggttactattatttttcgtataatttttaacagtttgaggttttagatttttagttacagaagtgatatcgaatattttatccaaaaagaatgagtaattaattgtcttagaaggagtgttttcttggcaaaagaataccaagtgcttaaatatttctactacttcattaatcttttctgtactcagattcagtttctcatcttttacttgattgattatttcaaagactaacttataatcctttttatttattctctcgttagccttaagaaaactagatacaaaatttgcatctacatcatccgtggatatttgatttttttccatgatatccaagagttccgagataatttctccagaacattgatgagacaataatctccgcaatacatttctcaaatgaataagtttattagacacgtggaagtttgactttttttgtacctttgtacatttttgaaataccgactcgcaaaaaatacaatattcatatccttgttcagatactataccgttgtgtctacaaccgctacataatcgtagattcatgttaacactctacgtatctcgtcgtccaatattttatataaaaacattttatttctagacgttgccagaaaatcctgtaatatttttagttttttgggctgtgaataaagtatcgccctaatatggttaccgtcctccgccaatatagtagttaaattatccgcacatgcagaagaacacgcttaggcggattcagtacaatgttatatttttcgtaccaactcatttaaatatcataatctaaaatagttctgtaatatgtctagcgctaatatattgatcataatcctgtgcataaattaagatacaacaatgtctcgaaatcatcgacatggcttcttccatagttagaagatcgtcgtcaaagttagcaacgtgattcatcaacatttgctgttttgaggcagcaaatactgaaccatcgccattcaaccattcataaaaaccatcgtctgaatccattgataatttcttgtactggtttttgagagctcgcatcaatctagcatttctagctcccggattgaaaacagaaagaggatcgtacatccagggtccattttctgtaaatagaatcgtataatgtcccttcaagaagatatcagacgatccacaatcaaagaattggtctccgagtttgtaacaaactgcggactttaacctatacatgataccgtttagcataatttctggtgatacgtcaatcggagtatcatctattagagatctaaagccggtgtaacattctccaccaaacatattcttattctgacgtcgttctacataaaacatcattgctccattaacgataacaggggaatgaacagcactacccatcacattagttcccaatggatcaatgtgtgtaactccagaacatcttccatatcctatgttaggaggagcgaacaccactcttccactattgccatcgaatgccatagaataaatatccttggaattgatagaaatcggactgtcggatgttgtgatcatcttcataggattaacaacgatgtatggtgccgcctgaagtttcatatcgtaactgatgccgtttataggtctagccacagaaaccaacgtaggtctaaatccaactatagacaaaatagaagccaatatctgttcctcatctgtcataacttgagagcatccagtatgaataatcttcattagatggggatctaccgcatcatcatcgttacaataaaaaattcccattctaatgttcataattgcttttctaatcatggtatgcatgtttgctctctgaatctctgtggaaattagatctgatacacctgtaatcactatcggattatcctccgtaagacgattaaccaacaacatataattataagactttacttttctaaattcataaagttgctggattaggctataggtgtctccatgtacatacgcgttctcgagcgcaggaagtttaataccgaatagtgccatcagaataggatgaatatagtaattagtttctggttttctataaataaaagacaaatcttgtgaactagacatatcggtaaaatgcatggattggaatcgtgtagtcgacagaagaatatgatgattagatggagagtatattttatctaactctttgagttggtcaccgattctaggactagctcgagaatgaataagtactaaaggatgagtacatttcacagaaacactagcattgttcaatgtgctctttacatgggtaaggagttgaaatagctcgtttctatttgttctgacaatatttagtttattcataatgttaagcatatcctgaatagtaaagttagatgtgtcatacttgttagtagttagatatttagcaattgcattcccatcatttctcaatctcgtactccaatcatgtgtagatgctacttcatctatagaaaccatacaatcctttttgataggctgttgagattgattatttcctgcacgtttaggtttggtacgttgatttctagcccctgcggatataaagtcatcgtctacaatttgggacaatgaattgcatacactacaagacaaagatttatcagaagtgtgaatatgatcttcatctaccaaagaaagagtttgattagtataactagattttagtcctgcgttagatgttaaaaaaacatcgctattgaccacggcttccattatttatattcgtagtttttactcgaaagcgtgattttaatatccaatcttattacttttggaatcgttcaaaacctttgactagttgtagaatttgatctattgccctacgcgtatactcccttgcatcatatacgttcgtcaccagatcgtttgtttcggcctgaagttggtgcatatctttttcaacactcgacatgagatccttaagggccatatcgtctagattttgttgagatgctgctcctggatttggattttgttgtgctgttgtacatactgtaccaccagtaggtgtaggagtacatacagtggccacaataggaggttgaggaggtgtaaccgttggagtagtacaagaaatatttccatccgattgttgtgtacatgtagttgttggtaacgtctgagaaggttgggtagatggcggcgtcgtcgttttttgatctttattaaatttagagataatatcctgaacagcattgctcggcgtcaacgctggaaggagtgaactcgccggcgcatcagtatcttcagacagccaatcaaaaagattagacatatcagatgatgtattagtttgttgtcgtggttttggtgtaggagcagtactactaggtagaagaataggagccggtgtagctgttggaaccggctgtggagttatatgaatagttggttgtagcggttggataggctgtctgctggcggccatcatattatctctagctagttgttctcgcaactgtctttgataatacgactcttgagactttagtcctatttcaatcgcttcatcctttttcgtatccggatccttttcttcagaataatagattgacgactttggtgtagaggattctgccagcccctgtgagaacttgttaaagaagtccatttaaggctttaaaattgaattgcgattataagattaaatggcagacacagacgatattatcgactatgaatccgatgatctcactgaatacgaggatgatgaagaagaggaagaagatggagagtcactagaaactagtgatatagatcccaaatcttcttataagattgtagaatcagcatccactcatatagaagatgcgcattccaatcttaaacatatagggaatcatatatctgctcttaaacgacgctatactagacgtataagtctatttgaaatagcgggtataatagcagaaagctataacttgcttcaacgaggaagattacctctagtttcagaattttctgacgaaacgatgaagcaaaatatgctacatgtaattatacaagagatagaggagggttcttgtcctatagtcatcgaaaagaacggagaattgttgtcggtaaacgattttgacaaagatggtctaaaattccatctagactatattatcaaaatttggaaacttcaaaaacgatattagaatttatacgaatatcgttctctaaatgtcacaatcaagtctcgcatgttcagcaatttattgtcgtactttatatcgtgttcattaacgatatcttgcaaaatagtaatgattctatcttccttcgatagatattcttcagagattattgtcttatattctttcttgttatcagatatgaatttgataagactttgaacattattgatacccgtctgtttaattttttctacagatattttagttttggcagattctatcgtatctgtcaatagacatccaacatcgacattcgacgtcaattgtctataaatcaacgtataaattttagaaataacattagcgaattgttgtgcattgatgtcgttattctgaaacagtatgattttaggtagcattttcttaacaaagagaacgtatttattgttactcagttgaacagatgatatatccagattactaacgcatctgattccgtataccaaactttcagaagaaatggtatacaattgtttgtattcattcaatgtctctttttcagaaattagtttagagtcgaatactgcaataattttcaagagatagttttcatcagataagattttatttagtgtagatatgataaaactattgttttgttggagaacttgatacgccgcgttctctgtagtcgacgctctcaaatgggaaacaatctccattatttttttggaatcggatacaatatcttcggtatcttgacgcagtctagtatacatagagttaagagagattagagtttgtacattaagcaacatgtctctaaatgtggctacaaacttttccttttccacatcatctagtttattatataccgatttcacaacggcaccagatttaaggaaccagaatgaaaaactctgataactacaatatttcatcatagttacgattttatcatcttctatagttggtgtgatagcgcatacctttttctccaagactggaaccaacgtcataaaaatgtttaaatcaaaatccatatcaacatctgatgcgctaagaccagtctcgcgttcaagattatctttactaatggtgacgaactcatcgtataaaactctaagtttgtccattatttatttacagatttagttgtttaatttatttgtgctcttccagagttgggatagtatttttctaacgtcggtattatattattaggatctacgttcatatgtatcataatattaatcatccacgttttgataaatctatctttagcttctgaaataacgtatttaaacaaaggagaaaaatatttagctacggcatcagacgcaataacattttttgtaaatgtaacatatttagacgacagatcttcgttaaaaagttttccatctatgtagaatccatcagttgttaacaccattcccgcgtcagattgaataggagtttgaatagtttgttttggaaatagatccttcaataacttatagttgggtgggaaaaaatcgattttatcactagactctttcttttttactatcattacctcatgaactatttcttgaatgagtatatgtattttctttcctatatcggacgcgttcattggaaaatataccatgtcgttaactataagaatatttttatcctcgtttacaaactgaataatatcagatgtagttcgtaaacgaactatatcatcaccagcacaacatctaactatatgatatccactagtttcctttagtcgtttattatcttgttccatattagcagtcattccatcatttaagaaggcgtcaaagataatagggagaaatgacattttggattctgttacaactttaccaaaattaaggatatacggacttactatctttttctcaacgtcaatttgatgaacacacgatgaaaatgtacttcgatgagattgatcatgtagaaaacaacaagggatacaatatttccgcatatcatgaaatatattaagaaatcccaccttattatatttccccaaaggatccatgcacgtaaacattatgccgttatcattaataaagacttctttctcatcggatctgtaaaagttgttactgatttttttcattccaggatctagataattaataatgatgggttttctattcttattctttgtattttggcatatcctagaccagtaaacagtttccactttggtaaaatcagcagacttttgaacgctattaaacatggcattaatggcaataactaaaaatgtaaaatatttttctatgttaggaatatggtttttcactttaatagatatatggtttttggccaaaatgatagatatttttttatccgaggatagtaaaatattattagtcgccgtctctataaaaatgaagctagtctcgatatccaattttattctagaattgataggagtcgccaaatgtaccttatacgttatatctcccttgatgcgttccatttgtgtatctatatcggacacaagatctgtaaatagttttacgttattaatcatcacggtatcgccgtcgctagataatgctaatgtaccatccaagtcccaaatggagagatttaactgttcatcgtttagaataaaatgattaccggtcatattaataaagtgttcatcgtatctagataacaacgacttataattaatgtccaagtcttgaactcgctgaatgatcttttttaacccagttagttttagattggtacgaaatatattgttaaactttgattctacagtaatgtccaaatctagttgtggaaatacttccatcaacattgtttcaaacttgataatattattatctacatcttcgtacgatccaaattccggaatagatgtatcgcacgctctgaccacccagataaccaaaaagtcacacgctccaggatatacattgtataaaaagctatcgttttttagtagtgtttttttctgagtatatacgaagggattaaaaatagtattatcaacgtaactatattccaaattattcttatgagaatagataataatatcgtccttaatatctaacaaatttcctaaatatccctttaattgagtcattcgaagcgtcaatagaatatgtctcttaactatttccggctgttgtatatttaaatgacttcgtaaaaaataatatatgggcgacttctcatctatgtaatcatatggagtgagatatagggctcgttctacctcctgccccttacccacctgtaataccaattgcggacttactatatatcgcatatttatatcgtggggtaaagtgaaaatctactaccgatgatgtaagtcttacaatgttcgaaccagtaccagatcttaatttggaggcctccgtagaactaggggaggtaaatatagatcaaacaacacctatgataaaggagaatagcggttttatatcccgcagtagacgtctattcgcccatagatctaaggatgatgagagaaaactagcactacgattctttttacaaagactttattttttagatcatagagagattcattatttgttcagatgcgttgacgctgtaaaagacgtcactattaccaaaaaaaataacattatcgtggcgccttatatagcacttttaactatcgcatcaaaaggatgcaaacttacagaaacaatgattgaagcattctttccagaactatataatgaacatagtaagaaatttaaattcaactctcaagtatccatcatccaagaaaaactcggataccagtttggaaactatcacgtttatgattttgaaccgtattactctacagtagctctggctattcgagatgaacattcatctggcatttttaatatccgtcaagagagttatctggtaagttcattatctgaaataacatatagattttatctaattaatctaaaatctgatcttgttcaatggagtgctagtacgggcgctgtaattaatcaaatggtaaatactgtattgattacagtgtatgaaaagttacaactggtcatagaaaatgattcacaatttacatgttcattggctgtggaatcagaacttccaataaaattacttaaagatagaaatgaattatttacaaaattcattaacgagttaaaaaagaccagttcattcaagataagcaaacgcgataaggatacgctattaaaatattttacttaggactggagttagaatttatagacgactcatttcgtttatcattattactaccatcattattagtattcttcttgtcatcttgttcagaaatatacagcaatgctatacctaatactaaatacattatcatgctcgcaatggctctaacaacaacgaaccaaaatgaatttggtcgtagcttttgttcacaaaaatacataaagaaatgtctacataaatctatggcgccattggctacttgaaatagcgccagtcctcctacagattttaatatagctgtataacatgacatttattcatcatcaaaagagacagagtcaccatctgtcatatttagattttttttcatgtgttcaaagtatcctctactcatttcattataatagtttatcatacttagaattttaggacggatcaatgagtaagacttgactagatcgtcagtagtaatttgtgcatcgtctattctgcatccgcttcgtcgaataatgtatagcatcgctttgagattctccatagctatcaagtctttatacaatgacatggaaatatctgtgaatactttatacttctccaacatcgatgccttaacatcatcgcctactttagcattgaaaatacgttctattgtgtagatggatgtagcaagatttttaaacaacaatgccattttacacgatgattgcctcaagtctccaatcgtttgtttagaacgattagctacagagttcaacgcttggctgactagcatattattatctttagaaattgtattcttcaatgaggcgtttatcatatctgtgatttcgttagtcatattacagtctgactgggttgtaatgttatccaacatatcacctatggatacggtacacgtaccagcatttgtaataatcctatctaagatgttgtatggcattgcgcagaaaatatcttctcctgtaatatctccactctcgataaatctactcagattattcttaaatgccttattctctggagaaaagatatcagtgtccatcatttcattaatagtatacgcagaaaagataccacgagtatcaattctatccaagatacttatcggttccgagtcacagataatggtttcctctccttcgggagatcctgcatagaaatatctaggacaatagtttctatactgtctgtaactctgataatctctaaagtcactaactgataccatgaaattgagaagatcaaacgctgaagtaattaatttttctgcctcgtttttactacaactagttttcatcaatgtagtgacgatgtattgtttagttactcttggtctaatactgatgatagagatattattacttcccataatggatcttctagtagtcaccttaaagcccattgatgcaaatagcagatagataaagtcttggtatgactcctttctaatatagtacggactacctttgtcacccaactttatacccacataagccataacaacctctttaatagccgtttcatgaggtttatcagccatgagcctgagtagttggaagaatctcatgaatcccgtctcagaaagtcctatatgcatgatagatttatctttcctgggaaactctcgtatagtcatagatgaaatactcttcaaagtttctgaaataagattagtaacagtcttacctccgactactctaggtaacaaacaaactctaataggtgttttctctgcggagataatatcagaaaggatagagcaataagtagtattattgtgattataaagaccgaatacataacaggtagaatttataaacatcatgtcctgaaggtttttagacttgtattcctcgtaatccataccgtcccaaaacatggatttggtaactttgatagccgtagatctttgttccttcgccaacaggttaaagaaattaataaagaatttgttgtttctatttatgtccacaaattgcacgtttggaagcgccacggttacattcactgcagcattttgaggatcgcgagtatgaagtacgatgttattgtttactggtatatctggaaagaaatctaccagtctaggaataagagattgatatcgcatagaaatacaaaagttcataatctcatcatcgaagagcattttgttaccattgtaataaatatccactctgtcatatgtataaatgaagtactgttcaaacatgatgagatgtttatatgttggcatagtagtgagatcgacgtttggtaatggcaatgtattaagattaactccataatgtctagcagcatctgcgatgttataagtgttgtcaaagcggggtcgatcttgtgctgttatatattgtctaacacctataagattatcaaaatcttgtctgcttaatacaccgttaacaatttttgccttgaattcttttattggtgcattaataacatccttatagaggatgttaaacaaataagtattatcaaagttaagatctgggtatttcttttctgctagaacatccattgagtcggagccatctggtttaatataaccaccgataaatctagctctgtattctgtatccgtcaatctaatattaagaaggtgttgagtgaaaggtggaagatcgtaaaagctgtgagtattaatgataggattagtttccgaactaatgttaattggggtattaataatatctatatttccagcgttaagtgtaacattaaacagttttaattcacgtgacgtggtatcaattaaataattaatgcccaatttggatatagcagcctgaagctcatcttgtttagttacggatcctaatgagttattaagcaatatatcgaacggatgaacgaaggttgttttgagtttgtcgcatactttgtaatctagacatagatgcggaagaacggtagaaactatacgaaataaatattcagagtcctctaattgatcaagagtaactattgacttaataggcatcatttatttagtattaaatgacgaccgtaccagtgacggatatacaaaacgatttaattacagagttttcagaagataattatccatctaacaaaaattatgaaataactcttcgtcaaatgtctattctaactcacgttaacaacgtggtagatagagaacataatgccgccgtagtgtcatctccagaggaaatatcctcacaacttaatgaagatctatttccagatgatgattctccggccactattatcgaaagagtacaacctcatactactattattgacgatactccacctcctacgtttcgtagagagttattgatatcggaacaacgtcaacaacgagaaaaaagatttaatattacagtatcgaaaaatgctgaagcaataatggaatctagatctatgatatcttctatgccaacacaaacaccatccttgggagtagtttatgataaagataaaagaattcagatgttggaggatgaagtggttaatcttagaaatcaacgatctaatacaaaatcatctgataatttagataattttaccagaatactatttggtaagactccgtataaatcaacagaagttaataagcgtatagccatcgttaattatgcaaatttgaacgggtctcccttatcagtcgaggacttggatgtttgttcagaggatgaaatagatagaatctataaaacgattaaacaatatcacgaaagtagaaaacgaaaaattatcgtcactaacgtgattattattgtcataaacattatcgagcaagcattgctaaaactcggatttgaagaaatcaaaggactgagtaccgatatcacttcagaaattatcgatgtggagatcggagatgactgcgatgctgtagcatctaaactaggaatcggtaacagtccggttcttaatattgtattgtttatactcaagatattcgttaaacgaattaaaattatttaatttaatacattcccatatccagacaacaatcgtctggattaatctgttcctgtcgtctcataccggacgacatattaatctttttattagtaggcatctttttagatggtttctttttcccagcattaactgagtcgatacctagaagatcgtgattgatctctccgaccattccacgaacttctaattggccgtctctgacggtaccataaactattttaccagcattagtaacagcttggacaatctgaccatccatcgcattgtacgatgtagtagtaactgttgttctacgtctaggagcaccagaagtatttttggagcccttggaggttgatgtagaagaagacgaggattttgattttggtttacatgtaatacattttgaactctttgattttgtatcacatgcgccggcagtcacatctgtttgagaattaagattattgttgcctcctttgacggctgcatctccaccgatttgcgctagtagatttttaagctgtggtgtaatcttattaactgtttcgatataatcatcgtaactgcttctaacggctaaattttttttatccgccatttagaagctaaaaatatttttatttatacagaagatttaactagattatacaatgaactaatatgatccttttccagattatttacaaacttggtattttttggttctggaggaggcgaatttaaattcggacttggattcggattttgtgagttcttgatcttattatacatcgagtataggatggcgacggtaactgctacgcaaataccgatcaacaaaagaataccaatcatttattgacaataacttcactattgatcaagtatgcaatatatcatcttttcactaaataagtagtaataatgattcaacaatgtcgagatatatggacgataataatttagttcatggaaatatcgctatgattggtatgaatgactccgctaactctgtggggtgcgcagtgctttccccacatagaataaattagcattccgactgtgataataataccaagtataaacgccataatactcaatactttccatgtacgagtgggactggtagacttactaaagtcaataaaggcgaagatacacgaaagaatcaaaagaatgattccagcgattagcacgccggaaaaataatttccaatcataagcatcatgtccatttaactaataaaaattttaaatcgccgaatgaacaaagtggaatataaaccatataaaaacaatagtttgtactgcaaaaataatatctatttttgttttcgaagatatggtaaaattaaatagtagtacacagcatgttataactaacagcagcaacggctcgtaattacttatcatttactagacgaaaaggtggtgggatattttcttgctcaaataatacgaatatatcacccatccattttatgcgatgtttatatactctaatctttaatagatctatagacgacgggtttaccaacaatatagattttatcgattcatctaatttaaacccttccttaaacgtgaatgatctattatctggcataacgatgactctacctgatgaatcggacaatgtactgggccatgtagaataaattatcaacgaattatcgtctacgaacatttatatcatttgttttaattttaggacgcgaataaatagatataaaatagaaaataacagatattacaaccaatgttatggccgcgcccaaccaggtaggcagttttattttatcttttactacaggttctcctggatgatgtacgtcaccaacggcggacgtagttctagtacaattagacgtaagttctgcttgggaattttttaacgctaaagagttaacgttaatcgtgcacccaacgtatttacatctagttctttgaacatcttgattataatataaccattttctatctctagattcgtcggtgcactcatgtaaccaacataccctaggtcctaaatatttatctccggaattagattttggataattcgcgcaccaacaatttctatttcctttatgatcgttacaaaagacgtataatgccgtatccccaaaagtaaaataatcaggacgaataattctaataaactcagaacaatatctcgcatccatatgtttggagcaaatatcggaataagtagacatagccggtttccgttttgcacgtaaccattctaaacaattggggtttccaggatcgtttctacaaaatccagtcatgaaatcgtcacaatgttctgtcttgtaattattattaaatatttttggacagtgtttggtatttgtcttagaacaacattttgctacgctatcactatcgcccaggagataatccttttttataaaatgacatcgttgcccggatgctatataatcagtagcgtgttttaaatccttaatatattcaggagttacctcgttctgataatagattaatgatccaggacgaaatttgaaagaactacatggttctccatgaattaatacatattgtttagcaaattcaggaactataaaactactacaatgatctatcgacataccatctatcaaacaaaatttgggtttaatttctcccggagatgtttcataatagtacgtataactttcttctgcaaacttaacagctctattatattcaggataattaaaacctaattccatatatttgtctcgtatatctgctattcctggtgctattttgattctattaagagtaacagctgcccccattcttaataatcgtcagtatttaaactgttaaatgttggtatatcaacatctaccttatttcccgcagtataaggtttgttgcaggtatactgttcaggaatggttacatttatacttcttctatagtcctgtctttcgatgttcatcacatatgcaaagaacagaataaacaaaataatgtaagaaataatattaaatatctgtgaattcgtaaatacattgattgccataataattacagcagctacaatacacacaatagacattcccacagtgttgccattacctccacgatacatttgagttactaagcaataggtaataactaagctagtaagaggcaatagaaaagatgagataaatatcatcaatatagagattagaggagggctatatagagccaagacgaacaaaatcaaaccgagtaacgttctaacatcattatttttgaagattcccaaataatcattcattcctccataatcgttttgcatcatacctccatctttaggcataaacgattgctgctgttcctctgtaaataaatctttatcaagcactccagcacccgcagagaagtcgtcaagcatattgtaatatcttaaataactcatttatatattaaaaaatgtcactattaaagatggagtataatctttatgccgaactaaaaaaaatgacttgtggtcaacccctaagtctttttaacgaagacggggatttcgtagaagttgaaccgggatcatcctttaagtttctgatacctaagggattttacgcctctccttccgtaaagacgagtctagtattcgagacattaacaacgaccgataataaaatcactagtatcaatccaacaaatgcgccaaagttatatcctcttcaacgcaaagtcgtatctgaagtagtttctaatatgaggaaaatgatcgaatcaaaacgtcctctatacattactcttcacttggcgtgtggatttggtaagactattaccacgtgttatcttatggctacacacggtagaaaaaccgtcatttgcgtacccaataaaatgttaatacatcaatggaagacacaggtagaggcagtcggattggaacataagatatccatagatggagtaagtagtctattaaaggaactaaagactcaaagtccggatgtattaatagtagtcagtagacatctgacaaacgatgccttttgtaaatatatcaataagcattatgatttgttcatcttggatgaatcacatacgtataatctgatgaacaatacagcagttacaagatttttagcgtattatcctccgatgatgtgttattttttaactgctacacctagaccagctaaccgaatttattgtaacagtattattaatattgccaagttatccgatctaaaaaaaactatctatgcggtagatagtttttttgagccatattccacagataatattagacatatgataaaacgattagatggaccatctaataaatatcatatatatactgagaagttattatctgtagacgagcctagaaatcaacttattcttgataccctggtagaagaattcaagtcaggaactattaatcgaattttagttattactaaactacgtgaacatatggtattcttctacaaacgattattagatcttttcggaccagaggttgtatttataggagacgcccaaaatagacgtactccagatatggtcaaatcaatcaaggaactaaatagatttatattcgtatccaccttattttattccggtactggtttagatattcctagtttggattcgttgttcatttgctcggcagtaatcaacaatatgcaaatagagcaattactagggagggtatgtcgagaaacagaactattagataggacggtatatgtatttcctagcacatccatcaaagaaataaagtacatgataggaaatttcatgcaacgaattattagtctgtctgtagataaactaggatttaaacaaaaaagttatcggaaacatcaagaatccgatcccacttctgtatgtacaacatcctccagagaagaacgtgtattaaatagaatatttaactcgcaaaatcgttaagaagtttaagcgacgatccgcatgctgcgcaggccagtgtattacccctcatagtattaatataatccaatgatacttttgtgatgtcggaaatcttaaccaatttagactgacaggcagaacacgtcatgcaatcatcatcgtcatcgataactgtagtcttgggcttctttttgcggctcttcattccggaacgcacattggtgctatccatttaggtagtaaaaaataagtcagaatatgccctatagcacgatcgtgcaaaacctggtatatcgtctctatctttatcacaatatagtgtatcgacatctttattattattgacttcgtttatcttggaacatggaatgggaacatttttgttatcaacggccacctttgccttaattccagatgttgtaaaattataactaaacagtctatcatcgacacaaatgaaattcttgtttagacgtttgtagtttacgtatgcggctcgttcgcgtctcattttttcagatattgcaggtactataatattaaaaataagaatgaaataacataggattaaaaataaagttatcatgacttctagcgctgatttaactaacttaaaagaattacttagtctgtacaaaagtttgagattttcagattctgcggctatagaaaagtataattctttggtagaatggggaacatctacttactggaaaataggcgtgcaaaaggtagctaatgtcgagacgtcaatatctgattattatgatgaggtaaaaaataaaccgtttaatattgatccgggctattacattttcttaccggtatattttgggagcgtctttatttattcgaagggtaaaaatatggtagaacttggatctggaaactcttttcaaataccagatgatatgcgaagtgcgtgtaacaaagtattagacagcgataacggaatagactttctgagatttgttttgttaaacaatagatggataatggaagatgctatatcaaaatatcagtctccagttaatatatttaaactagctagtgagtacggattaaacatacccaaatatttagaaattgaaatagaggaagacacattatttgacgacgagttatactctattatagaacgctcttttgatgataaatttccaaaaatatccatatcgtatattaagttgggagaacttagacggcaagttgtagactttttcaaattctcgttcatgtatattgagtccatcaaggtagatcgtataggagataatatttttattcctagcgttataacaaaatcaggaaaaaagatattagtaaaagatgtagaccatttaatacgatccaaggttagagaacatacatttgtaaaagtaaaaaagaaaaacacattttccattttatacgactatgatggaaacggaacagaaactagaggagaagtaataaaacgaattatagacactataggacgagactattatgttaacggaaagtatttctctaaggttggtagtgcaggcttaaagcaattgactaataaattagatattaatgagtgcgcaactgtcgatgagttagttgatgagattaataaatccggaactgtaaaacgaaaaataaaaaaccaatcagcatttgatttaagcagagaatgtttgggatatccagaagcggattttataacgttagttaataacatgcggttcaaaatagaaaattgtaaggttgtaaatttcaatattgaaaatactaattgtttaaataacccgagtattgaaactatatatagaaactttaaccagttcgtctcaatctttaatgtcgtcaccgatgtcaaaaaaagattattcgagtgaaataatatgcgcctttgatataggtgcaaaaaatcctgccagaactgttttagaagtcaaggataactccgttagggtattggatatatcaaaattagactggagttctgattgggaaaggcgcatagctaaagatttgtcacaatatgaatacactacagttcttctagaacgtcagcctagaaggtcgccgtatgttaaatttatctattttattaaaggctttttatatcatacatcggctgccaaagttatttgcgtctcgcctgtcatgtctggtaattcatatagagatcgaaaaaagagatcggtcgaagcatttcttgattggatggacacattcggattgcgagactccgttccggatagacgcaaattagacgatgtagcggatagtttcaatttggctatgagatacgtattagataaatggaatactaattatacaccttataataggtgtaaatctaggaattacataaaaaaaatgtaataacgttagtaacgccattatggataatctatttacctttctacatgaaatagaagatagatatgccagaactatttttaactttcatctaataagttgcgatgaaataggagatatatatggtcttatgaaagaacgaatttcctcagaggatatgtttgataatatagtgtataataaagatatacatcatgccattaagaaactagtgtattgcgacatccaacttactaaacacattattaatcagaatacgtatccggtatttaacgattcttcacaagtgaaatgttgtcattatttcgatataaactcagataatagcaatattagctctcgtacagtagagatatttgagagggaaaagtcatctcttgtatcatatattaaaactaccaataagaagagaaaggtcaattacggcgaaataaagaaaactgttcatggaggcactaatgcaaattacttttccggtaaaaagtctgatgagtatctgagtactacagttagatccaacattaatcaaccttggatcaaaaccatttctaagagaatgagagtagatatcattaatcactctatagtaacgcgtggaaaaagctctatattacaaactatagaaattatttttactaatagaacatgtgtgaaaatattcaaggattctactatgcacattattctatccaaggacaaggatgaaaaggggtgtatacacatgattgacaaattattctatgtctattataatttatttctgttgttcgaagatatcatccaaaacgagtactttaaagaagtagctaatgttgtaaaccacgtacttacggctacggcattagatgagaaattattcctaattaagaaaatggctgaacacgatgtttatggagttagcaatttcaaaatagggatgtttaacctgacatttattaagtcgttggatcataccgttttcccctctctgttagatgaggatagcaaaataaagttttttaaggggaaaaagctcaatattgtagcattacgatctctggaggattgtataaattacgtgactaaatccgagaatatgatagaaatgatgaaggaaagatcgactattttaaatagcatagatatagaaacggaatcggtagatcgtctaaaagaattgcttctaaaatgaaaaaaaacactgattcagaaatggatcaacgactcggatataagtttttggtgcctgatcctaaagccggagttttttatagaccgttacatttccaatatgtatcgtattctaattttatattgcatcgattgcatgaaatcttgaccgtcaagcggccactcttatcgtttaagaataatacagaacgaattatgatagaaattagcaatgttaaagtgactcctccagattactcacctataatcgcgagtattaaaggtaagagttatgacgcattagccacgttcactgtaaatatctttaaagaggtaatgaccaaagagggtatatccatcactaaaataagtagttatgagggaaaagattctcatttgataaaaattccgctactaataggatacgggaataaaaatccacttgatacagccaagtatcttgttcctaatgtcataggtggagtctttatcaataaacaatctgtcgaaaaagtaggaattaatctagtagaaaagattacaacatggccaaaatttagggttgttaagccaaactcattcactttctcgttttcctccgtatcccctcctaatgtattaccgacaagatatcgccattacaagatatctctggatatatcacaattggaagcgttgaatatatcatcgacaaagacatttataacggtcaatattgttttgctgtctcaatatttatctagagtgagtctagaattcattagacgtagcttatcatacgatatgcctccagaagttgtctatctagtaaacgcgataatagatagtgctaaacgaattactgaatctattactgactttaatattgatacatacattaatgacctggtggaagctgaacacattaaacaaaaatctcagttaacgatcaacgagttcaaatatgaaatgctgcataactttttacctcatatgaactatacacccgatcaactaaagggattttatatgatatctttactaagaaagtttctctactgtatctaccacacttctagatatccagatagagattcgatggtttgtcatcgtatactaacatacggcaaatattttgagacgttggcacatgatgaattagagaattacataggcaacatccgaaacgatatcatgaacaatcacaagaacagaggcacttacgcggtaaacattcatgtactaacaactcctggacttaatcatgcattttctagcttattgagtggaaagttcaaaaagtcagacggtagttatcgaacacatcctcactattcatggatgcagaatatttctattcctaggagtgttggattttatccggatcaagtaaagatttcaaagatgttttctgtcagaaaataccatccaagtcaatatctttacttttgttcatcagacgttccggaaagaggtcctcaggtaggtttagtatctcaattgtctgtcttgagttccattacaaatatactaacgtctgagtatttggatttggaaaagaaaatttgtgagtatatcagatcatattataaagatgatataagttactttgaaacaggatttccaatcactatagaaaatgctctagtcgcatctcttaatccaaatatgatatgtgattttgtaactgactttagacgtagaaaacggatgggattcttcggtaacttggaggtaggtattactttagttagggatcacatgaatgaaattcgcattaatattggagcgggaagattagtcagaccattcttggttgtggataacggagagctcatgatggatgtgtgtccggagttagaaagcagattagacgatatgacattctctgacattcagaaagagtttccacatgtcatcgaaatggtagatatagaacaatttacttttagtaacgtatgtgaatcggttcaaaaatttagaatgatgtcaaaggatgaaagaaagcaatacgatttatgtgactttcctgccgaatttagagatggatatgtggcatcttcattagtgggaatcaatcacaattctggacccagagctattcttggatgtgctcaagctaaacaagctatctcttgtctgagttcggatatacgaaataaaatagacaatggaattcatttgatgtatccagagaggccaatcgtgattagtaaggctttagaaacttcaaagattgcggctaattgcttcggccaacatgttactatagcattaatgtcgtacaaaggtatcaatcaagaggatggaattatcatcaaaaaacaatttattcagagaggcggtctcgatatagttaccgcaaagaaacatcaagtagaaattccgttggaaaactttaataacaaagaaagagataggtctaatgcatattcgaaattagaaagtaatggattagttagactgaatgctttcttggaatccggagacgctatggcacgaaatatctcatcaagaactcttgaagatgattttgctagagataatcagattagcttcgatgtttccgagaaatataccgatatgtacaaatctcgcgttgaacgagtacaagtagaacttactgacaaagttaaggtacgagtattaaccatgaaagaaagaagacccattctaggagacaaatttaccactagaacgagtcaaaagggaacagtcgcgtatgtcgcggatgaaacggaacttccatacgatgaaaatggtatcacaccagatgtcattattaattctacatccatcttctctagaaaaactatatctatgttgatagaggttattttaacagccgcatattctgctaagccgtacaacaataagggagaaaaccgacctgtctgttttcctagtagtaacgaaacatccatcgatacatatatgcaattcgctaaacaatgttatgagcattcaaatccgaaattgtctgatgaagaattatcggataaaatcttttgtgaaaagattctctatgatcctgaaacggataagccttatgcatccaaagtattttttggaccaatttattacttgcgtctgaggcatttaactcaggacaaggcaaccgttagatgtagaggtaaaaagacgaagctcattagacaagcgaatgagggacgaaaacgtggaggaggtattaagtttggagaaatggagagagactgtttaatagcgcatggcgcagccaatactattacagaagttttgaaagattcggaagaagattatcaagatgtgtatgtttgtgaaaattgtggagacatagcagcacaaatcaagggtattaatacatgtcttagatgttcaaaacttaatctctctcctctcttaacaaaaattgataccacgcacgtatctaaagtatttcttactcaaatgaacgccagaggcgtaaaagtcaaattagatttcgaacgaaggcctccttcgttttataaaccattagataaagttgatctcaagccgtcttttctggtgtaatattctagtttggtagtagatacatatcaatatcatcaaattcgagatccgaattataaaatgggcgtggattgttaactatagaatcggacgtctgatattcgaaaatctgtggagtttcaggttttggtggaggtgtaactgctacttgggatactgaagtctgatattcagaaagctgggggatgttctggttcgacatccaccgatggtgtcacatcactaatcggttcggtaacgtctgtggatggaggtgctacttctacagaacctgtagcctcagttgtcaacggagatacatttttaatgcgaggaaatgtataatttggtaatggtttctcatgtggatctgaagaagaggtaagatatctactagaaagataccgatcacgttctagttctcttttgtagaacttaactttttctttctcagcatctagttgatattccaacctcttcacgttactacgttcagatttcaattcacgttcgcatgggttacctccgcagtttttacgagcgatttcacgttcagccttcatgcgtctctgtgatccgtttacgttaaaccataaatacatgggtgatcctataaacatgaatttatttctaattctcagagctatagttaattgaccgtgtaatatttgcttacatgcatacttgatacgctcattaataagatttttatcattgctcgttatctcagaatcgtatatataaggagtaccatcgtgattcttaccagatattatacaaaatactatatataaaatatattgaccaacgttagtaatcatataaatgtttaacgttttaaattttgtattcaatgatccattatcatacgctagcatggtcttatgatattcattctttaaaatataatattgtgttagccattgcattggagctcctaatggagattttctattctcgtccattttaggatatgctttcataaagtccctaataacttcgtgaataatgtttctatgttttctactgatgcatgtatttgcttcgatttttttatcccatgtttcatctatcatagatttaaacgcagtaatgctcgcaacattaacatcttgaaccgttggtacaattccgttccataaatttataatgttcgccatttatataactcattttttgaatatacttttaattaacaaaagagttaagttactcatatggacgccgtccagtctgaacatcaatctttttagccagagatatcatagccgctcttagagtttcagcgtgattttccaacctaaatagaacttcatcgttgcgtttacaacacttttctatttgttcaaactttgttgttacattagtaatctttttttccaaattagttagccgttgtttgagagtttcctcattgtcgtcttcatcggctttaacaattgcttcgcgtttagcctctggctttttatcagcctttgtagaaaaaaattcagttgctggaattgcaagatcgtcatctccggggaaaagagttccgtccatttaaagtacagattttagaaactgacactctgcgttatttatatttggtacaacacatggattataaatattgatgttaataacatcagaaaatgtaaagtctatacattgttgcatcgtgttaaattttctaatggatctagtattattgggtccaacttctgcctgaaatccaaatatggaagcggatacaaaaccgtttcctggataaaccacacatctccacttttgctttacatcagaaattgtgtcgttgacatcttgaactctcctatctaatgccggtgttccacctatagattttgaatattcgaatgctgcatgagtagcattaaattccttaatattgccataattttcatatattgagtaaccctggataaaaagtaaacacaccgcagccgtcgctaccacaataaaaaaaattgatagagagttcatttataatctattagaagctgacaaaatttttttacacgcatcagacaatgctttaataaatagttcaacatctacttttgtcatatcgaaccgatggtatgattctaacctagaattacatccgaaaaagttgactatgttcatagtcattaagtcattaacaaacaacattccagactctggattataagacgatactgtttcgtcacaatcacctaccttaatcatgtgattatgaatattggctattagagcaccttctaagaaatctataatatctttgaaacacgatttaaaatcaaaccacgaatatacttctacgaagaaagttagtttacccataggagagataactataaatggagatctaaatacaaaatccggatctatgatagttttaacattattatattctctattaaatacctccacatctaaaaatgttaattttgaaactatgtcttcgtttattaccgtacctgaactaaacgctataagctctattgtttgagaactctttaaacgatattcttgaaatacatgtaacaaagtttcctttaactcggtcggtttatctaccatagttacagaatttgtatccttatctataatataataatcaaaatcgtataaagttatataattatcgcgttcagattgggatcttttcaaatagactaaaaaccccatttctctagtaagtatcttatgtatatgtttgtaaaatatcttcatggtgggaatatgctctaccgcagttagccattcctcattgacagcggtagatgtattagacaaaactattccaatgtttaacaagggccattttacgagattattaaatccttgtttgataaatgtagccaatgagggttcgagttcaacgacgattgaattctcttcccgcggatgctgcatgatgaacgacgggatgttgttcgattgatttggaattctttttcgactttttgtttatattaaatattttaaaatttatagctgatagcaattcatgtaccacggataatgtagacgcgtattgcgcatcgatatctttattattagataaatttatcaataaatgtgagaagtttgcctcgttaaggtcttccatttaaatattatataaacatttgtgtttgtatcttattcgtcttttatggaatagttttttactagtaaagctgcaattacacactttgtccgtaaaacataaatataaacaccagcttttatcaatcgttccaaaaagtcgacggcggacatttttaacatggcatctattttaaatacacttaggtttttggaaaaaacatcattttataattgtaacgattcaataactaaagaaaagattaagattaaacataagggaatgtcatttgtattttataagccaaagcattctaccgttgttaaatacttgtctggaggaggtatatatcatgatgatttggttgtattggggaaggtaacaattaatgatctaaagatgatgctattttacatggatttatcatatcatggagtgacaagtagtggagtaatttacaaattgggatcgtctatcgatagactttctctaaataggactattgttacaaaagttaataattatgatgatacattttttgacgacgatgattgatcgctattgcacaattttgtttttttactttctaatatagcgtttagattctttttcatgtgcgaatattgatttactaaaatatcgatgtttaacttttgttctatgacgtccttatcggcggtatcggtacatatacgtaattcaccttcacaaaatacggagtcttcgataataatagccaatcgattattggatctagctgtctgtatcatattcaacatgtttaatatatcctttcgtttcccctttacaggcatcgatcgtagcatattttccgcgtctgagatggaaatgttaaaactacaaaaatgcgtaatgttagcccgtcctaatattggtacgtgtctataagtttggcatagtagaataatagacgtgtttaaatgccttccaaagtttaagaattctattagagtattgcattttgatagtttatcgcctacatcatcaaaaataagtaaaaagtgtgctgattttttatgattttgtgcgacagcaatacatttttctatgttacttttagttcgtatcagattatattctagagattcctgactactaacgaaattaatatgatttggccaaatgtatccatcataatctgggttataaacgggtgtaaacaagaatatatgtttatattttttaactagtgtagaaaacagagatagtaaatagatagtttttccagatccagatcctcccgttaaaaccattctaaacggcatttttaataaattttctcttgaaaattgtttttcttggaaacaattcataattatatttacagttactaaattaatttgataataaatcaaaatatggaaaactaaggtcgttagtagggaggagaacaaagaaggcatatcgtgatataaataacatttattatcatgatgacaccagaaaacgacgaagagcagacatctgtgttctccgctactgtttacggagacaaaattcaaggaaagaataaacgcaaacgcgtgattggtctatgtattagaatatctatggttatttcactactatctatgattaccatgtccgcgtttctcatagtgcgcctaaatcaatgcatgtctgctaacgaggctgctattactgacgccgctgttgccgttgctgctgcatcatctactcatagaaaggttgcgtctagcactacgcaatatgatcacaaagaaagctgtaatggtttatattaccagggttcttgttatatattacattcagactaccagttattctcggatgctaaagcaaattgcactgcggaatcatcaacactacccaataaatccgatgtcttgattacctggctcattgattatgttgaggatacatggggatctgatggtaatccaattacaaaaactacatccgattatcaagattctgatgtatcacaagaagttagaaagtatttttgtgttaaaacaatgaactaatatttatttttgtacattaataaatgaaatcgcttaatagacaaactgtaagtatgtttaagaagttgtcggtgccggccgctataatgatgatactctcaaccattattagtggcataggaacatttctgcattacaaagaagaactgatgcctagtgcttgcgccaatggatggatacaatacgataaacattgttatctagataccaacattaaaatgtccacagataatgcggtttatcagtgtcgtaaattacgagctagattgcctagacctgatactagacatctgagagtattgtttagtattttttataaagattattgggtaagtttaaaaaagaccaataataaatggttagatattaataatgataaagatatagatattagtaaattaacaaattttaaacaactaaacagtacgacggatgctgaagcgtgttatatatacaagtctggaaaactggttaaaacagtatgtaaaagtactcaatctgtactatgtgttaaaaaattctacaagtgacaacaaaaaatgaattaataataagtcgttaacgtacgccgccatggacgccgcgtttgttattactccaatgggtgtgttgactataacagatacattgtatgatgatctcgatatttcaatcatggactttataggaccatacattataggtaacataaaaactgtccaaatagatgtacgggatataaaatattccgacatgcaaaaatgctactttagctataagggtaaaatagttcctcaggattctaatgatttggctagattcaacatttatagcatttgtgccgcatacagatcaaaaaataccatcatcatagcatgcgactatgatatcatgttagatatagaagataaacatcagccattttatctattcccatctattgatgtttttaacgctacaatcatagaagcgtataacctgtatacagctggagattatcatctaatcatcaatccttcagataatctgaaaatgaaattgtcgtttaattcttcattctgcatatcagacggcaatggatggattataattgatgggaaatgcaatagtaattttttatcataaaagttgtaaagtaaataataaaacaataaatattgaactagtagtacgtatattgagcaatcagaaatgatgctggtacctcttatcacggtgacagtagttgcgggaacaatattagtatgttatatattatatatttgtaggaaaaagatacgtactgtctataatgacaataaaattatcatgacaaaattaaaaaagataaagagttctaattccagcaaatctagtaaatcaactgatagcgaatcagactgggaggatcactgtagtgctatggaacaaaacaatgacgtagataatatttctaggaatgagatattggacgatgatagcttcgctggtagtttaatatgggataacgaatccaatgttatggcgcctagcacagaacacatttacgatagtgttgctggaagcacgctgctaataaataatgatcgtaatgaacagactatttatcagaacactacagtagtaattaatgaaacggagactgttgaagtacttaatgaagataccaaacagaatcctaactattcatccaatcctttcgtaaattataataaaaccagtatttgtagcaagtcaaatccgtttattacagaacttaacaataaatttagtgagaataatccgtttagacgagcacatagcgatgattatcttaataagcaagaacaagatcatgaacacgatgatatagaatcatcggtcgtatcattggtgtgattagtttcctttttataaaattgaagtaatatttagtattattgctgccgtcacgttgtacaaatggagatattccctgtattcggcatttctaaaattagcaattttattgctaataatgactgtagatattatatagatacagaacatcaaaaaattatatctgatgagatcaatagacagatggatgaaacggtacttcttaccaacatcttaagcgtagaagttgtaaatgacaatgagatgtaccatcttattccccatagactatcgactattatactctgtattagttctgtcggaggatgtgttatctctatagataatgacgtcaatggcaaaaatattctaacctttcccattgatcatgctgtaatcatatccccactgagtaaatgtgtcgtagttagcaagggtcctacaaccatattggttgttaaagcggatatacctagcaaacgattggtaacatcgtttacaaacgacatactgtatgtaaacaatctatcactgattaattatttgccgttgtctgtattcattattagacgagttaccgactatttggatagacacatatgcgatcagatatttgcgaataataagtggtattccattataaccatcgacaataagcagtttcctattccatcaaactgtataggtatgtcctctgccaagtacataaattctagcatcgagcaagatactttaatacatgtttgtaacctcgagcatccattcgacttagtatacaaaaaaatgcagtcgtacaattctgtacctatcaaggaacaaatattgtacggtagaattgataatataaatatgagcattagtatttctgtgtattaatagatttctagtatggggatcattaatcatctctaatctctaaatacctcataaaacgaaaaaaaagctattatcaaatactgtacggaatggattcattctcttctctttttatgaaactctgttgtatatctactgataaaactggaagcaaaaaatctgatagaaagaataagaataagatcaagatcaaggattatatggaacacgattattataaaataacaatagttcctggttcctcttccacgtctactagctcgtggtattatactcatgcctagtaatagtctctttgcgttgacggaaagcagactagaaataacaggctaaaatgttcagacaccataatagttcccaacccagataataacagagtaccatcaacacattcctttaaactcaatcccaaacccaaaaccgttaaaatgtatccggccaattgatagtagataatgaggtgtacagcgcatgataatttacacagtaaccaaaatgaaaatactttagtaattataagaaatatagatggtaacgtcatcatcaacaatccaataatatgccggagagtaaacattgacggataaaacaaaaatgctccgcataactctatcatggcaataacacaaccaaatacttgtaagattcctaaattagtagaaaatacaacggatatcgatgtataagtgatctcgagaaataataagaataaagtaatgcccgtaaagataaacatcaacattgtttggtaatcattaaaccaattagtatgaagttgaactaatttcacagtagattttattccagtgttatcctcgcatgtataagtacctggtaagatatctttatattctataatcaatgagacatcactatccgataacgaatgaagtctagcactagtatgccatttacttaatattgtcgtcttggaagttttattataagttaaaatatcatggttatccaatttccatctaatatactttgtcggattatctatagtacacggaataatgatggtatcattacatgctgtatactctatggtctttgtagttgttataacaaccaacgtatagaggtatatcaacgatattctaactcttgacattttttatttatttaaaatgatacctttgttatttattttattctattttgctaacggtattgaatggcataagtttgaaacgagtgaagaaataatttctacttacttattagacgacgtattatacacgggtgttaatggggcggtatacacattttcaaataataaactaaacaaaactggtttaactaataataattatatcacaacatctataaaagtagaggatgcggataaggatacattagtatgcggaaccaataacggaaatcccaaatgttggaaaatagacggttcagacgacccaaaacatagaggtagaggatacgctccttatcaaaatagcaaagtaacgataatcagttacaacgaatgtgtactatctgacataaacatatcaaaagaaggaattaaacgatggagaagatttgacggaccatgtggttatgatttatacacggcggataacgtaattccaaaagatggtttacgaggagcattcgtcgataaagatggtacttatgacaaagtttacattcttttcactgatactatcggctcaaagagaattgtcaaaattccgtatatagcacaaatgtgcctaaacgacgaaggtggtccatcatcattgtctagtcatagatggtcgacgtttctcaaagtcgaattagaatgtgatatcgacggaagaagttatagacaaattattcattctagaactataaaaacagataatgatacgatactatatgtattcttcgatagtccttattccaagtccgcattatgtacctattctatgaataccattaaacaatctttttctacgtcaaaattggaaggatatacaaagcaattgccgtctccagctcctggtatatgtttaccagctggaaaagttgtttcacataccacgtttgaagtcatagaaaaatataatgtactagatgatattataaagcctttatctaaccaacctatcttcgaaggaccgtctggtgttaaatggttcgatataaaggagaaggaaaatgaacatcgggaatatagaatatacttcataaaagaaaattctatatattcgttcgatacaaaatctaaacaaactcgtagctcgcaagtcgatgcgcgactattttcagtaatggtaacttcgaaaccgttatttatagcagatatagggataggagtaggaatgccacaaatgaaaaaaatacttaaaatgtaatcttaatcgagtacaccacacgacaatgaacaaacctaagacagattatgctggttatgcttgctgcgtaatatgcggtctaattgtcggaattatttttacagcgacactattaaaagttgtagaacgtaaattagttcatacaccatcaatagataaaacgataaaagatgcatatattagagaagattgtcctactgactggataagctataataataaatgtatccatttatctactgatcgaaaaacctgggaggaaggacgtaatacatgcaaagctctaaatccaaattcggatctaattaagatagagactccaaacgagttaagttttttaagaagccttagacgaggctattgggtaggagaatccgaaatattaaaccagacaaccccatataattttatagctaaaaatgccacgaagaatggaaatatatttgtagcacaacgaatactcccaaactgcattcgtgttacactatataacaattacactacatttttatcataccactacttcggttagatgttttagaaaaaaataaatatcgccgtaccgttcttgtttttataaaaataacaattaacaattatcaaattttttctttaatattttacgtggttgaccattcttggtggtaaaataatctcttagtgttggaatggaatgctgtttaatgtttccgcactcatcgtatattttgacgtatgcagtcacatcgtttacgcaatagtcagactgtagttctatcatgcttcctacatcagaaggaggaacagttttaaagtctcttggttttaatctattgccattagttttcatgaaatcctttgttttatccacttcacattttaaataaatgtccactatacattcttctgttaattttactagatcgtcatgggtcatagaatttataggttccgtagtccatggatccaaactagcaaacttcgcgtatacggtatcgcgattagtgtatacaccaacagtatgaaaattaagaaaacagtttaatagatcaacagaaatatttaatcctccgtttgatacagatgcgccatatttatggatttcggattcacacgttgtttgtctgaggggttcgtctagcgttgcttctacgtaaacttcgattcccatatattctttattgtcagaatcgcataccgatttatcatcatacactgtttgaaaactaaatggtatacacatcaaaataataaataataacgagtacattctgcaatattgttatcgtaattggaaaaatagtgttcgagtgagttggattatgtgagtattggattgtatattttattttatattttatattttatattttgtaataagaataaaatgctaatgtcaagtttattccaatagatgtcttattaaaaaacatatataataaataacaatggctgaatggcataaaattatcgaggatatctcaaaaaataataagttcgaggatgccgccatcgttgattacaagactacaaagaatgttctagctgctattcctaacagaacatttgccaagattaatccgggtgaaattattcctctcatcactaatcgtaatattctaaaacctcttattggtcagaaatattgtattgtatatactaactctctaatggatgagaacacgtatgctatggagttgcttactgggtacgcccctgtatctccgatcgttatagcgagaactcataccgcacttatatttttgatgggtaagccaacaacatccagacgtgacgtgtatagaacgtgtagagatcacgctacccgtgtacgtgcaactggtaattaaaataaaaagtaatattcatatgtagtgtcaattttaaatgatgatgatgaaatggataatatccatattgacgatgtcaataatgccggtattggcatacagctcatcgatttttagatttcattcagaggatgtggaattatgttatgggcatttgtattttgataggatctataatgtagtaaatataaaatataatccgcatattccatatagatataattttattaatcgcacgttaaccgtagatgaactagacgataatgtcttttttacacatggttattttttaaaacacaaatatggttcacttaatcctagtttgattgtctcattatcaggaaacttaaaatataatgatatacaatgctcagtaaatgtatcgtgtctcattaaaaatttggcaacgagtacatctactatattaacatctaaacataagacttattctctacatcggtccacgtgtattactataataggatacgattctattatatggtataaagatataaatgacaagtataatgacatctatgattttactgcaatatgtatgctaatagcgtctacattgatagtgaccatatacgtgtttaaaaaaataaaaatgaactcttaattatgctatgctattagaaatggataaaatcaaaattacggttgattcaaaaattggtaatgttgttaccatatcgtataacttggaaaagataactattgatgttacaccaaaaaagaaaaggatgtattattagcgcaatcagttgctgtcgaagaggcaaaagatgtcaaggtagaagaaaaaaatattatcgatattgaagatgacgatgatatggatgtagaaagcgcgtaatactatctataaacataagtatataataaatactttttatttacggtactcttgtagtggtgataccctactcgattatttttttaaaaaaaaaatacttattctgattcttctaaccatttccgtgttcgtttgaatgccacatcgacgtcaaagataggggagtagttgaaatctagttctgcattgttggtacgcacctcaaatgtagtgttggatatcttcaacgtatagttgttgagtagtgatggttttctaaatagaattctcttcatatcattcttgcacgcgtacatttttagcatccatcttggaatcctagatccttgttctattcccaatggtttcatcaatagaagattaaacatatcgtacgaacacgatggagagtaatcgtagcaaaagtaagcatttcctttaatcttagatcccggatactggatatattttgcagccaacacgtgcatccatgcagcatttcctacatatacccggctatgtaccgcgttatcatcgactgtacgatacataatgttaccgtgttgcttacattgctcgtaaaagactttcgtcaatttgtctccttctccgtaaattccagtgggtcttaggcaacaagtatacaattttgctccattcatgattacggaattattggctttcataaccagttgctcggccatacgtttactttttgcgtatacatgtcctggtgatatatcataaagggtatgctcatggccgatgaatggatcaccgtgtttattgggtcctattgcttccatgctactagtatagatcaaatacttgattcctaggtccacacaagctgccaatatagtctgtgttccataatagtttactttcatgatttcattatcggtgtattttccaaatacatccactagagcagccgtatgaataatcagatttaccccatctagcgcttctctcaccttatcaaagtcgtttatatcacattgtatatagtttataaccttaactttcgaggttattggttgtggatcttctacaatatctatgactctgatttcttgaacatcatctgcactaattaacagttttactatatacctgcctagaaatccggcaccaccagtaaccgcgtacacggccattgctgccactcataatatcagactacttattctattttactaaataatggctgtttgtataatagaccacgataatatcagaggagttatttactttgaaccagtccatggaaaagataaagttttaggatcagttattggattaaaatccggaacgtatagtttgataattcatcgttacggagatattagtcaaggatgtgattccataggcagtccagaaatatttatcggtaacatctttgtaaacagatatggtgtagcatatgtttatttagatacagatgtaaatatatttacaattattggaaaggcgttatctatttcaaaaaatgatcagagattagcgtgtgaagttattggtatttcttacataaatgaaaagataatacattttcttacaattaacgagaatggcgtttgatatatcagttaatgcgtctaaaacaataaatgcattagtttacttttctactcagcaaaataaattagtcatacgtaatgaagttaatgatacacactacactgtcgaatttgatagggacaaagtagttgacacgtttatttcatataatagacataatgacaccatagagataagaggggtgcttccagaggaaactaatattggttgcgcggttaatacgccggttagtatgacttacttgtataataagtatagttttaaactgattttagcagaatatataagacacagaaatactatatccggcaatatttattcggcattgatgacactagatgatttggctattaaacagtatggagacattgatctattatttaatgagaaacttaaagtagactccgattcgggactatttgactttgtcaactttgtaaaggatatgatatgttgtgattctagaatagtagtagctctatctagtctagtatctaaacattgggaattgacaaataaaaagtataggtgtatggcattagcgaacatatatctgatagtattccaatatctgagctatctagactacgatacaatctatgtaagtatctacgcgggcacactgagagcatagaggatgaatttgattattttgaagacgatgattcgtctacatgttctgccgtaaccgacagggaaacggatgtataattttttttatagcgtgaaggatatgataaaaaatataattgttgtatttatcccattccaatcaccttatatgattctgtaaaaaaattatactgtaacacaataaaggagtcttatagatgtatagaggtcagatactggtttgataaactgtttattccacataagtatgtttgactttatggttagacccgcatactttaacaaatcactgaaaattggagttaggtattgacctctcagaatcagttgccgttctggaacattaaatgtattttttatgatatactccaacgcatttatgtgggcatacaacaagtcattactaatggagtattccaagagttttagttgtctagtatttaacaagagaagagatttcaacagactgtttatgaactcgaatgccgcctcattgtcgcttatattgatgatgtcgaattctcccaatatcatcaccgatgagtagctcatcttgttatcgggatccaagttttctaaagatgtcattaaaccctcgatcatgaatggatttatcatcatcgtttttatgttggacatgagcttagtccgtttgtccacatctatagacgacgatttctgaattatttcatatatccctctctttaactccaggaacttgtcaggatggtctactttaatatgttctcgtctaagagatgaaaatctttggatggttgcacgcgacttttctctaaaggatgacgttgcccaagatcctctcttaaatgaatccatcttatccttggacaagatggacagtctattttccttagatggtttaatatttttgttacccatgatctataaaggtagacctaatcgtctcggatgaccatatatttattttcagttttattatacgcataaattgtaaaaaatatgttaggtttacgaaaatgtctcgtggggcattaatcgtttttgaaggattggacaaatctggaaaaacaacacaatgtatgaacatcatggaatctataccggcaaacacgataaaatatcttaactttcctcagagatccactgtcactggaaagatgatagatgactatctaactcgtaaaaaaacctataatgatcatatagttaatctattattttgtgcaaatagatgggagtttgcatcttttatacaagaacaactagaacagggaattactttaatagttgatagatacgcattttctggagtagcgtatgccgccgctaaaggcgcgtcaatgactctcagtaagagttatgaatctggattgcctaaacccgacttagttatattcttggaatctggtagcaaagaaattaatagaaacgtcggcgaggaaatttatgaagatgttacattccaacaaaaggtattacaagaatataaaaaaatgattgaagaaggagatattcattggcaaattatttcttctgaattcgaggaagatgtaaagaaggagttgattaagaatatagttatagaggctatacacacggttactggaccagtggggcaactgtggatgtaatagtgaaattacattttttataaatagatgttagtacagtgttataaatggatgaagcatattactctggcaacttggaatcagtactcggatacgtgtccgatatgcataccgaactcgcatcaatatctcaattagttattgccaagatagaaactatagataatgatatattaaacaaggacattgtaaattttatcatgtgtagatcaaacttggataatccatttatctctttcctagatactgtatatactattatagatcaagagaactatcagactgagttgattaattcattagacgacaatgaaattatcgattgtatagttaataagtttatgagcttttataaggataacctagaaaatatagtagatgctatcatcactctaaaatatataatgaataatccagattttaaaactacgtatgccgaagtactcggttccagaatagccgatatagatattaaacaagtgatacgtaagaatatactacaattgtctaatgatatccgcgaacgatatttgtgaaaaatattaaaaaaaaatactttttttattaaatgacgtcgcttcgcgaatttagaaaattatgctgtgatatatatcacgcatcaggatataaagaaaaatctaaattaattagagactttataacagatagggatgataaatatttgatcattaagctattgcttcccggattagacgatagaatttataacatgaacgataaacaaattataaaattatatagtataatatttaaacaatctcaggaagatatgctacaagatttaggatacggatatataggagacactattaggactttcttcaaagaaaacacagaaatccgtccaagagataaaagcattttaactttagaagacgtggatagtttcttaactacgttatcatccgtaactaaagaatcgcatcaaataaaattattgactgatatcgcatccgtttgtacatgtaatgatttaaaatgtgtagtcatgcttattgataaagatctaaaaattaaagcgggtcctcggtacgtacttaacgctattagtcctaatgcctatgatgtgtttagaaaatctaataacttgaaagagataatagaaaattcatctaaacaaaatctagactctatatctatttctgttatgactccaattaatcccatgttagcggaatcgtgtgattctgtcaataaggcgtttaaaaaatttccatcaggaatgtttgcggaagtcaaatacgatggtgaaagagtacaagttcataaaaataataacgagtttgccttctttagtagaaacatgaaaccagtactctctcataaagtggattatctcaaagaatacataccgaaagcatttaaaaaagctacgtctatcgtattggattctgaaattgttcttgtagacgaacataatgtaccgctcccgtttggaagtttaggtatacacaaaaagaaagaatataaaaactctaacatgtgtttgttcgtgtttgactgtttgtactttgatggattcgatatgacggacattccattgtacgaacgaagatcttttctcaaagatgttatggttgaaatacccaatagaatagtattctcagagttgacgaatattagtaacgagtctcagttaactgacgtattggatgatgcactaacgagaaaattagaaggattggtcttaaaagatattaatggagtatacgaaccgggaaagagaagatggttaaaaataaagcgagactatttgaacgagggttccatggcagattctgccgatttagtagtactaggtgcctactatggtaaaggagcaaagggtggtatcatggcagtctttctaatgggttgttacgacgatgaatccggtaaatggaagacggtaactaaatgttccggtcacgatgataatacgttaagggttttgcaagaccaattaacgatgattaaaattaacaaggatcccaaaaaaattccagagtggttagtagttaataaaatctatattcccgattttgtagtagaggatccgaaacaatctcagatatgggaaatttcaggagcagagtttacatcttccaagtcccataccgcaaatggaatatccattagatttcctagatttactaggataagagaggataaaacgtggaaagaatctactcatctaaacgatttagtaaacttgactaaatcttaatagttacatacaaactgaaaattaaaataacaccatttagttggtggtcgccatggatggtgttattgtatactgtctaaacgcgttagtaaaacatggcgaggaaataaatcatataaaaaatgatttcatgattaaaccatgttgtgaaagagtttgtgaaaaagttaagaacgttcacattggcggacaatctaaaaacaatacagtgattgcagatttgccatatatggataatgctgtatcggatgtatgcaattcactgtataaaaagaatgtatcaagaatatccagatttgctaatttgataaagatagatgacgatgacaagactcctactggtgtatataattattttaaacctaaagatgttattcctgttatcatatctataggaaaggataaagatgtctgtgaactattaatctcatcagacatatcgtgtgcatgcgtggagttaaattcatataaagtagccattcttcccatggatgtttccttttttaccaaaggaaatgcatcattgattattctcctgtttgatttctctatcgatgcagcacctctcttaagaagtgtaaccgataataatgttattatatctagacaccagcgtctacatgacgagcttccgagttccaattggttcaagttttacataagtataaagtccgactattgttctatattatatatggttgttgatggatctgtgatgcatgcgatagctgataatagaactcacgcaattattagcaaaaatatattagacaatactacgattaacgatgagtgtagatgctgttattttgaaccacagattaggattcttgatagagatgagatgctcaatggatcatcgtgtgatatgaacagacattgtattatgatgaatttacctgatgtaggcgaatttggatctagtatgttggggaaatatgaacctgacatgattaagattgctctttcggtggctggtaatttaataagaaatcgagactacattcccgggagacgaggatatagctactacgtttacggtatagcctctagataatttttttaagcacgaaataaaaaacataattttaaaccaatctatttcatactattttgtgtgatcaccatggacataaagatagatattagtatttctggtgataaatttacggtgactactaggagggaaaatgaagaaagaaaaaaatatctacctctccaaaaagaaaaaactactgatgttatcaaacctgattatcttgagtacgatgacttgttagatagagatgagatgtctactattctagaggaatattttatgtacagaggtctattaggcctcagaataaaatatggacgactctttaacgaaattaaaaaattcgacaatgatgcggaagaacaattcggtactatagaagaactcaagcagaaacttagattaaattctgaagagggagcagataactttatagattatataaaggtacaaaaacaggatatcgtcaaacttactgtatacgattgcatatctatgataggattgtgtgcatgcgtggtagatgtttggagaaatgagaaactgttttctagatggaaatattgtttacgagctattaaactgtttattaatgatcacatgcttgataagataaaatctatactgcagaatagactagtatatgtggaaatgtcatagaaagttaaaagttaatgagagcaaaaatatataaggttgtattccatatttgttattttttctgtaatagttaaaaaaatacattcgatggtctatctatcagattattatgtgttataaggtactttttctcataataaactagagtatgagtaagatagtgtttttcaaaacatataaatctaaaattgatggatgagatatacagctattaatttcgaaaatatattttaatctgataactttaaacatggatttttgatggtggtttaacgttttaaaaaaagattttgttattgtagtatatgataatattaaaagatggatataaagaatttgctgactgcatgtactattttttacattactacattggctacggcagatatacctactccgccaccaacgggtcatgtgacaagggagaatatcttgataagaggcataatcaatgttgtaatcggtgtccacctggagaatttgccaaggttagatgtaatggtaacgataacacaaaatgtgaacgctgcccacctcatacatataccacaatcccaattattctaatggatgtcatcaatgtagaaaatgcccaacaggatcatttgataaggtaaagtgtaccggaacacagaacagtaaatgttcgtgtcttcctggttggtattgcgctactgattcttcacagactgaagattgttgaaattgtataccaaaaaggagatgtccatgcggatactttggtggaatagatgaacaaggaaatcctatttgtaaatcgtgttgtgttggtgaatattgcgactacctacgtaattatagacttgatccatttcctccatgcaaactatctaaatgtaattaattatgattttgatgataatgttaccatacattatatcgctacttggttagtgtattattcagtatgaagacctattaataattacttatcttttgacgatcttgttataattataatataaaaatacttatggcatagtaactcataattgctgacgcgataaattcgtaataatctgttttgttcaaaggaatctacaggcataaaaataaaaatataatttataatatactcttacaacgccatcatgaataacagcagtgaattgattgctgttattaatggatttagaaatagtggacgattttgtgatattaatatagttattaatgatgaaaggataaacgctcataaactcatcctatctggagcctccgaatatttttccattctgttttccaataattttatcgattctaatgaatacgaagttaatctaagtcatttagattatcaaagtgttaacgatttgatcgattacatttatgggatacctttgagcctaactaacgataacgtgaaatatattctttcaaccgctgattttttacaaattggatctgccattacggagtgtgaaaattacatacttaaaaatctttgttctaaaaactgtatcgatttctacatatacgctgataaatataataacaagaaaatagaatcagcgtcgtttaacacaatattacaaaatattttgagactcatcaacgatgaaaactttaaatacttaacagaggaatcaatgataaaaattttaagcgatgatatgttaaatataaaaaatgaggatttcgccccactaattctcattaaatggttagagagtactcaacaatcatgcaccgtcgagttacttaaatgcctcagaatatcattgctttccccacaagttataaaatcactttatagtcatcgactggttagttcaatctacgaatgtataacattcttaaacaatatagcattcttggatgaatcatttcctagataccatagcatcgagttgatatctatcggtataagtaattcgcgtgataaaatttccataaactgctacaatcataaaaaaaatacatgggaaatgatatcttcacgtagatataggtgtagtttcgcagtggccgtcctggataatattatttatatgatgggtggatatgatcagtccccgtatagaagttcaaaggttatagcgtacaatacatgtacaaattcttggatatatgatataccagagctaaaatatcctcgttctaattgtgggggactggctgatgacgaatacatttattgtataggcggcatacgcgatcaggattcatcgttgacatctagtattgataaatggaagccatcaaaaccatattggcagaagtatgctaaaatgcgcgaaccaaaatgtgatatgggggttgcgatgttaaacggattaatatatgttataggtggaatcgttaaaggtgacacgtgtaccgacgcactagagagtttatcagaagatggatggatgaagcatcaacgtcttccaataaaaatgtccaatatgtcgacgattgttcatgatggcaagatttatatatctggaggttacaacaatagtagtgtagttaatgtaatatcgaatctagtccttagctataatccgatatatgatgaatggaccaaattatcatcattaaacattcctagaattaatcccgctctatggtcagcgcataataaattatatgtaggaggaggaatatctgatgatgttcgaactaatacatctgaaacatacgataaagaaaaagattgttggacattggataatggtcacgtgttaccacgcaattatataatgtataaatgcgaaccgattaaacataaatatccattggaaaaaacacagtacacgaatgattttctaaagtatttggaaagttttataggtagttgatagaacaaaatacataattttgtaaaaataaatcactttttatactaatatgacacgattaccaatacttttgttactaatatcattagtatacgctacaccttttcctcagacatctaaaaaaataggtgatgatgcaactctatcatgtaatcgaaataatacaaatgactacgttgttatgagtgcttggtataaggagcccaattccattattcttttagctgctaaaagcgacgtcttgtattttgataattataccaaggataaaatatcttacgactctccatacgatgatctagttacaactatcacaattaaatcattgactgctagagatgccggtacttatgtatgtgcattctttatgacatcgcctacaaatgacactgataaagtagattatgaagaatactccacagagttgattgtaaatacagatagtgaatcgactatagacataatactatctggatctacacattcaccagaaactagttctgagaaacctgattatatagataattctaattgctcgtcggtattcgaaatcgcgactccggaaccaattactgataatgtagaagatcatacagacaccgtcacatacactagtgatagcattaatacagtaagtgcaacatctggagaatccacaacagacgagactccggaaccaattactgataaagaagaagatcatacagtcacagacactgtctcatacactacagtaagtacatcatctggaattgtcactactaaatcaaccaccgatgatgcggatctttatgatacgtacaatgataatgatacagtaccatcaactactgtaggtagtagtacaacctctattagtaattataaaaccaaggactttgtagaaatatttggtattaccgcattaattatattgtcggccgtggcaatattctgtattacgtattatatatgtaataaacgttcacgtaaatacaaaacagagaacaaagtctagatttttgacttacataaatgtctgggatagtaaaatctatcatattgagcggaccatctggttcaggaaagacagccatagccaaaagactatgggaatatatttggatttgtggtgtcccataccactagatttcctcgtcctatggaacgagaaggtgtcgattaccattacgttaacagagaggccatctggaagggaatagccgccggaaactttctagaacatactgagtttttaggaaatatttacggaacttctaaaactgctgtgaatacagcggctattaataatcgtatttgtgtgatggatttaaacatcgacggtgttagaagttttaaaaatacttacctaatgccttactcggtgtatataagacctacctctcttaaaatggttgagaccaagcttcgttgtagaaacactgaagctaacgatgagattcatcgtcgcgtgatattggcaaaaacggatatggatgaggccaacgaagcaggtctattcgacactattattattgaagatgatgtgaatttagcatatagtaagttaattcagatactacaggaccgtattagaatgtattttaacactaattaaagacttaagacttaaaacttgataattaataatataactcgtttttatatgtggctatttcaacgtctaatgtattagttaaatattaaaacttaccacgtaaaacttaaaatttaaaatgatatttcattgacagatagatcacacattatgaactttcaaggacttgtgttaactgacaattgcaaaaatcaatgggtcgttggaccattaataggaaaaggtggatttggtagtatttatactactaatgacaataattatgtagtaaaaatagagcccaaagctaacggatcattatttaccgaacaggcattttatactagagtacttaaaccatccgttatcgaagaatggaaaaaatctcacaatataaagcacgtaggtcttatcacgtgcaaggcatttggtctatacaaatccattaatgtggaatatagattcttggtaattaatagattaggtgtagatctagatgcggtgatcagagccaataataatagattaccaaaaaggtcggtgatgttgatcggaatcgaaatcttaaataccatacaatttatgcacgagcaaggatattctcacggagatattaaagcgagtaatatagtcttggatcaaatagataagaataaattatatctagtggattacggattggtttctaaattcatgtctaatggcgaacatgttccatttataagaaatccaaataaaatggataacggtactctagaatttacacctatagattcgcataaaggatacgttgtatctagacgtggagatctagaaacacttggatattgtatgattagatggttgggaggtatcttgccatggactaagatatctgaaacaaagaattgtgcattagtaagtgccacaaaacagaaatatgttaacaatactgcgactttgttaatgaccagtttgcaatatgcacctagagaattgctgcaatatattaccatggtaaactctttgacatattttgaggaacccaattacgacgagtttcggcacatattaatgcagggtgtatattattaagtgtggtgtttggtcgatgtaaaatttttgtcgataaaaattaaaaaataacttaatttattattgatctcgtgtgtacaaccgaaatcatggcgatgttttacgcacacgctctcggtgggtacgacgagaatcttcatgcctttcctggaatatcatcgactgttgccaatgatgtcaggaaatattctgttgtgtcagtttataataacaagtatgacattgtaaaagacaaatatatgtggtgttacagtcaggtgaacaagagatatattggagcactgctgcctatgtttgagtgcaatgaatatctacaaattggagatccgatccatgatcaagaaggaaatcaaatctctatcatcacatatcgccacaaaaactactatgctctaagcggaatcgggtacgagagtctagacttgtgtttggaaggagtagggattcatcatcacgtacttgaaacaggaaacgctgtatatggaaaagttcaacatgattattctactatcaaagagaaggccaaagaaatgagtacacttagtccaggacctataattgattaccacgtctggataggagattgtatctgtcaagttactgctgtggacgtacatggaaaggaaattatgagaatgagattcaaaaagggtgcggtgcttccgatcccaaatctggtaaaagttaaacttggggagaatgatacagaaaatctttcttctactatatcggcggcaccatcgaggtaaccacctctctggaagacagcgtgaataatgtactcatgaaacgtttggaaactatacgccatatgtggtctgttgtatatgatcattttgatattgtgaatggtaaagaatgctgttatgtgcatacgcattcatctaatcaaaatcctataccgagtactgtaaaaacaaatttgtacatgaagactatgggatcatgcattcaaatggattccatggaagctctagagtatcttagcgaactgaaggaatcaggtggatggagtcccagaccagaaatgcaggaatttgaatatccagatggagtggaagacactgaatcaattgagagattggtagaggagttcttcaatagatcagaacttcaggctggtaaattagtcaaatttggtaattctattaattgttaaacatacatctgtttcagctaagcaactaagaacacgtatacggcagcagcttcctttatactctcatcttttaccaacacaaagggtggatatttgttcattggagttgataataatacacacaaagtatttggattcacggtgggttacgactacctcagactggtagagaatgatatagaaaagcatatcaaaagactttgtgttgtgcatttctgtgagaagaaagaggacatcaagtacgcgtgtcgattcatcaaggtatataaacctggggatgaggctacctcgacatacgtgtgcgctatcaaagtggaaagatgctgttgtgctgtgtttgcagattggccagaatcatggtatatggatactaatggtatcaagaagtattctccagatgaatgggtgtcacatataaaattttaattaatgtaactatagagaacaaataataggttgtaatatcatatagacaataactaacaattaattagtaactgttatctcttttttaactaaccaactaactatatacctattaatacatcgtaattatagttcttaacatctattaatcattgattcgcttctttaattttttataaactaacattgttaattgaaaagggataacatgttacagaatataaattatatatggatttttttaaaaaggaaatacttgactggagtgtatatttatctcttcattatatagcacgcgtgtgttccaattcttccacatcccatataatacaggattataatctcattcgaacatacgagaaagtggataaaacaatagttgattttttatctaggttgccaaatttattccatattttagaatatggggaaaatattctacatatttattctatggatgatgctaatacgaatattataattttttttctagatagagtattaaatattaataagaacgggtcatttatacacaatctcaggttatcatcatccattaatataaaagaatatgtatatcaattagttaataatgatcatccagataataggataagactaatgcttgaaaatggacgtagaacaagacattttttgtcctatatatcagatacagttaatatctatatatgtattttaataaatcatggattttatatagatgccgaagacagttacggttgtacattattacatagatgtatatatcactataagaaatcagaatcagaatcatacaatgaattaattaagatattgttaaataatggatcagatgtagataaaaaagatacgtacggaaacacaccttttatcctattatgtaaacacgatatcaacaacgtggaattgtttgagatatgtttagagaatgctaatatagactctgtagactttaatagatatacacctcttcattatgtctcatgtcgtaataaatatgattttgtaaagttattaatttctaaaggagcaaatgttaatgcgcgtaataaattcggaactactccattttattgtggaattatacacggtatctcgcttataaaactatatttggaatcagacacagagttagaaatagataatgaacatatagttcgtcatttaataatttttgatgctgttgaatctttagattatctattatccagaggagttattgatattaactatcgtactatatacaacgaaacatctatttacgacgctgtcagttataatgcgtataatacgttggtctatctattaaacagaaatggtgattttgagacgattactactagtggatgtacatgtatttcggaagcagtcgcaaacaacaacaaaataataatggaagtactattgtctaaacgaccatctttgaaaattatgatacagtctatgatagcaattactaaaaataaacaacataatgcagatttattgaaaatgtgtataaaatatactgcgtgtatgaccgattatgatactcttatagatgtacagtcgctacagcaatataaatggtatattttaaaatgtttcgatgaaatagatatcatgaagagatgttatataaaaaataaaactgtattccaattagttttttgtatcaaagacattaatactttaatgagatacggtaaacatccttctttcgtgaagtgcactagtctcgacgtatacggaagtcgtgtacgtaatatcatagcatctattagatatcgtcagagattaattagtctattatccaagaagctggatgcgggagataaatggtcgtgttttcctaacgaaataaaatataaaatattggaaaactttaacgataacgaactgtccacatatctaaaaatcttataaacactattaaaatataaaatctaagtaggataaaatcacactacatcattgtttccttttagtgctcgacagtgtatactatttttaacactcataaataaaaatgaaaacgatttccgttgttacgttgttatgcgtactacctgctgttgtttattcaacatgtactgtacccactatgaataacgctaaattaacgtctaccgaaacatcgtttaataataaccagaaagttacgtttacatgtgatcagggatatcattcttcggatccaaatgctgtctgcgaaacagataaatggaaatacgaaaatccatgcaaaaaaatgtgcacagtttctgattacatctctgaactatataataaaccgctatacgaagtgaattccaccatgacactaagttgcaacggcgaaacaaaatattttcgttgcgaagaaaaaaatggaaatacttcttggaatgatactgttacgtgtcctaatgcggaatgtcaacctcttcaattagaacacggatcgtgtcaaccagttaaagaaaaatactcatttggggaatatatgactatcaactgtgatgttggatatgaggttattggtgcttcgtacataagttgtacagctaattcttggaatgttattccatcatgtcaacaaaaatgtgatataccgtctctatctaatggattaatttccggatctacattttctatcggtggcgttatacatcttagttgtaaaagtggttttatactaacgggatctccatcatccacatgtatcgacggtaaatggaatcccgtactcccaatatgtgtacgaactaacgaagaatttgatccagtggatgatggtcccgacgatgagacagatttgagcaaactctcgaaagacgttgtacaatatgaacaagaaatagaatcgttagaagcaacttatcatataatcatagtggcgttaacaattatgggcgtcatatttttaatctccgttatagtattagtttgttcctgtgacaaaaataatgaccaatataagttccataaattgctaccgtaaatataaatccgttaaaataattaataattaataattaataattaataacgaacaagtatcaaaagattaaagacttatagctagaatcaattgagatgtcttcttcagtggatgttgatatctacgatgccgttagagcatttttactcaggcactattataacaagagatttattgtgtatggaagaagtaacgccatattacataatatatacaggctatttacaagatgcgccgttataccgttcgatgatatagtacgtactatgccaaatgaatcacgtgttaaacaatgggtgatggatacacttaatggtataatgatgaatgaacgcgatgtttctgtaagcgttggcaccggaatactattcatggaaatgtttttcgattacaataaaaatagtatcaacaatcaactaatgtatgatataattaatagcgtatctataattctagctaatgagagatatagaagcgcttttaacgacgatggtatatacatccgtagaaatatgattaacaagttgtacggatacgcatctctaactactattggcacgatcgctggaggtgtttgttattatctgttgatgcatctagttagtttgtataaataattatttcaatatactagttaaaattttaagattttaaatgtataaaaaactaataacgtttttatttgtaataggtgcattagcatcctattcgaataatgagtacactccgtttaataaactgagtgtaaaactctatatagatggagtagataatatagaaaattcatatactgatgataataatgaattggtgttaaattttaaagagtacacaatttctattattacagagtcatgcgacgtcggatttgattccatagatatagatgttataaacgactataaaattattgatatgtataccattgactcgtctactattcaacgcagaggtcacacgtgtagaatatctaccaaattatcatgccattatgataagtacccttatattcacaaatatgatggtgatgagcgacaatattctattactgcagagggaaaatgctataaaggaataaaatatgaaataagtatgatcaacgatgatactctattgagaaaacatactcttaaaattggatctacttatatatttgatcgtcatggacatagtaatacatattattcaaaatatgatttttaaaaatttaaaatatattatcacttcagtgacagtagtcaaataacaaacaacaccatgagatatattataattctcgcagttttgttcattaatagtatacacgctaaaataactagttataagtttgaatccgtcaattttgattccaaaattgaatggactggggatggtctatacaatatatcccttaaaaattatggcatcaagacgtggcaaacaatgtatacaaatgtaccagaaggaacatacgacatatccgcatttccaaagaatgatttcgtatctttctgggttaaatttgaacaaggcgattataaagtggaagagtattgtacgggactatgcgtcgaagtaaaaattggaccaccgactgtaacattgactgaatacgacgaccatatcaatttgtacatcgagcatccgtatgctactagaggtagcaaaaagattcctatttacaaacgcggtgacatgtgtgatatctacttgttgtatacggctaacttcacattcggagattctgaagaaccagtaacatatgatatcgatgactacgattgcacgtctacaggttgcagcatagactttgccacaacagaaaaagtgtgcgtgacagcacagggagccacagaagggtttctcgaaaaaattactccatggagttcggaagtatgtctgacacctaaaaagaatgtatatacatgtgcaattagatccaaagaagatgttcccaatttcaaggacaaaatggccagagttatcaagagaaaatttaataaacagtctcaatcttatttaactaaatttctcggtagcacatcaaatgatgttaccacttttcttagcatgcttaacttgactaaatattcataactaatttttattaatgatacaaaaacgaaataaaactgcatattatacactggttaacgcccttataggctctaaccattttcaagatgaggtccctgattatagtccttctgttcccctctatcatctactccatgtctattagacgatgtgagaagactgaagaggaaacatggggattgaaaatagggttgtgtataattgccaaagatttctatcccgaaagaactgattgcagtgttcatctcccaactgcaagtgaaggattgataactgaaggcaatggattcagggatatacgaaacaccgataaattataaaaaaagcaatgtgtccgctgtttccgttaataatactattttcgtaactggcggattattcataaataactctaatagcacgatcgtggttaacaatatggaaaaacttgacatttataaagacaaacaatggtcgattatagaaatgcctatggctagggtatatcacggcatcgactcgacatttggaatgttatattttgccggaggtctatccgttaccgaacaatatggtaatttagagaaaaacaacgagatatcttgttacaatcctagaacgaataagtggtttgatatttcatatactatttataagatatccatatcatcattgtgtaaactaaataacgtcttctatgtatttagtaaggacattggatatgtggaaaagtatgatggtgcatggaagttagtacatgatcgtctccccgctataaaggcattatcaacttctccttattgattgaaaatgaaaatataaatagtttttatgtatagcagtattaccctatagttttattgcttactactaacatggatacagatacagatacagatacagatacagatacagatacagatacagatacagatgttacaaatgtagaagatatcataaatgaaatagatagagagaaagaagaaatactaaaaaatgtagaaattgaaaataataaaaacattaacaagaatcatccaagtggatatattagagaagcactcgttattaatacaagtagtaatagtgattccattgataaagaagttatagaatgtatcagtcacgatgtaggaatatagatcatatctactaatttttataatcaatacaaaacataaaaaacaactcgttattacatagcaggcatggaatccttcaagtattgttttgataacgatggcaagaaatggattatcggaaatactttatattctggtaattcaatactctataaggtcagaaaaaatttcactagttcgttctacaattacgtaatgaagatagatcacaaatcacacaagccattgttgtctgaaatacgattctatatatctgtattggatcctttgactatcgacaactggacacgggaacgtggtataaagtatttggctattccagatctgtatggaattggagaaaccgatgattatatgttcttcgttataaagaatttgggaagagtattcgccccaaaggatactgaatcagtcttcgaagcatgtgtcactatgataaacacgttagagtttatacactctcgaggatttacccatggaaaaatagaaccgaggaatatactgattagaaataaacgtctttcactaattgactattctagaactaacaaactatacaagagtggaaactcacatatagattacaacgaggacatgataacttcaggaaatatcaattatatgtgtgtagacaatcatcttggagcaacagtttcaagacgaggagatttagaaatgttgggatattgcatgatagaatggttcggtggcaaacttccatggaaaaacgaaagtagtataaaagtaataaaacaaaaaaaagaatataaaaaatttatagctactttctttgaggactgttttcctgaaggaaatgaacctctggaattagttagatatatagaattagtatacacgttagattattctcaaactcctaattatgacagactacgtagactgtttatacaagattgaaattatattctttttttatagagtgtggtagtgttacggatatctaatattaatattagactatctctatcgcgctacacgaccaatatcgattactatgaatatcttctatgaaaggagagaatgtattcatttctccagcgtcaatctcgtcagtattgacaatactgtattatggagctaatggatccactgctgaacagctatcaaaatatgtagaaacggaggagaacacggataaggttagcgctcagaatatctcattcaaatccataaataaagtatatgggcgatattctgccgtgtttaaagatttctttttgggaaaaattggcgataagtttcaaactgttgacttcactgattgtcgcactatagatgcaatcaacaagtgtgtagatatctttactgaggggaaaatcaatccactattggatgaaccattgtctcctagcaattagtgccgtatactttaaagcaaaatggttgacgccattcgaaaaggaatttaccagtgattatcccttttacgtatcaccaacggaaatggtagatgtaagtatgatgtctatgtacggcgagctatttaatcacgcatctgtaaaggaatcattcggcaacttttcaatcatagaactgccatatgttggagatactagtatgatggtcattcttccagacaagattgatggattagaatccatagaacaaaatctaacagatacaaattttaagaaatggtgtaactctctggatgctatgtttatagatgttcacattcccaagtttaaggtaacaggctcgtataatctggtggatactctagtaaagtcaggactgacagaggtgttcggttcaactggagattatagcaatatgtgtaatttagatgtgagtgtcgacgctatgatccacaaaacgtatatagatgtcaatgaagagtatacagaagcagctgcagcaacttgtgcactggtgtcagactgtgcatcaacaattacaaatgagttctgtgtagatcatccgttcatctatgtgattaggcatgttgatggaaaaattcttttcgttggtagatattgctctccaacaactaattgttaaccattttttttaaaaaaaatagaaaaaacatgtggtattagtgcaggtcgttgttcttccaattgcaattggtaagatgacagccaactttagtacccacgtcttttcaccacagcactgtggatgtgacagactgaccagtattgatgacgtcaaacaatgtttgactgaatatatttattggtcgtcctatgcataccgcaacaggcaatgcgctggacagttgtattccacactcctctcttttagagatgatgcggaattagtgttcatcgacattcgcgagctggtaaaaaatatgccgtgggatgatgtcaaagattgtacagaaatcatccgttgttatataccggatgagcaaaaaaccatcagagagatttcggccatcatcggactttgtgcatatgctgctacttactggggaggtgaagaccatcccactagtaacagtctgaacgcattgtttgtgatgcttgagatgctcaattacgtggattataacatcatattccggcgtatgaattgatgagttgtacatcttgacattttcttctttcttctcttctccctttcccagaaacaaacttttttacccactataaaataaaatgagtatactacctgttatatttcttcctatatttttttattcttcattcgttcagacttttaacgcgtctgaatgtatcgacaaagggtaatattttgcatcattcatggagttagaaaacgagccagtaatcttaccatgtcctcaaataaatacgctatcatccggatataatatattagatattttatgggaaaaacgaggagcggataatgatagaattataccgatagataatggtagcaatatgctaattctgaacccgacacaatcagactctggtatttatatatgcattaccacgaacgaaacctactgtgacatgatgtcgttaaatttgacaatcgtgtctgtctcagaatcaaatatagattttatctcgtatccacaaatagtaaatgagagatctactggcgaaatggtatgtcccaatattaatgcatttattgctagtaacgtaaacgcagatattatatggagcggacatcgacgccttagaaataagagacttaaacaacggacacctggaattattaccatagaagatgttagaaaaaatgatgctggttattatacatgtgttttagaatatatatacggtggcaaaacatataacgtaaccagaattgtaaaattagaggtacgggataaaataatacatcctactatgcaattaccagaaggtgttgtaacttcaataggtagtaatttgactattgcgtgtagagtatcgttgagacctcccacaacggatgcagacgtcttttggataagtaatggtatgtattacgaagaagatgatggggacggagacggtagaataagtgtagcaaataaaatctatatgaccgataagagacgtgttattacatcccggttaaacattaatcctgtcaaggaagaagatgctacaacgtttacgtgtatggcgtttactattcctagcatcagcaaaacagttactgttagtataacgtgaatgtatgttgttacatttccatgtcaattgagtttataagaatttttatacattatcttccaacaagcaattgacgaacgtattgctatgattaactcccacgatactatgcatattattaatcattaacttgcagactatacctagagctattttgacatactcgtgttcttgtgtaattgcagtatctatattattaaagtacgtaaatctagctatagttttattatttaattttagataatataccgtctccttatttttaaaaattgccacatcctttattaaatcatgaatgggaatttctatgtcatcgttagtatattgtgaacaacaagagcagatatctataggaaagggtggaatgcgatacattgatctatgtagttttaaaacacacgcaaactttgaagaatttatataaatcattccatcgatacatccttctatgttgacatgtatatatccaggaattcttttattaatgtcaggaaatgtataaactaaaacattgcccggaagcggagcttctaccggagttatatccgttcttaacttacaaaatgtaaccaatacctttgcatgacttgttttgttcggcaacgttagtttaaacttgacgaatggattaattacaatagcatgatccgcgcatctattaagtttttttactttaacgcccttgtatgtttttacagagactttatctaaatttctagtacttgtatgtgttataaatataacgggatatagaaccgaatcacctaccttagatacccaattacattttatcagatccagataataaacaaattttgtcgccctaactaattctatattgttatatattttacaattggttatgatatcatgtaataacttggaatctaacgcacatcgtcgtacgtttacacaattgtgatttagtgtagtatatctacacatgtatttttccgcgctatagtattctggactagtgataaaactatcgttatatctgtcttcaatgaactcatcgagatattgctctctgtcatattcatacacctgcataaactttctagacatcttacaatccgtgttattttaggatcatatttacatatttactggtataaagatgttagattagttaatgggaatcgtctataataatgaatattaaacaattatatgaggacttttaccacaaagcatcataaaaatgagtcgtcgtctgatttatgttttaaatatcaaccgcaaatcaactcataaaatacaagagaatgaaatatatacatattttagtcattgcaatatagaccatacttctacagaacttgattttgtagttaaaaactatgatctaaacagacgacaacatgtaactgggtatactgcactacactgctatttgtataataattactttacaaacgatgtactgaagatattattaaatcatgacgtaaatgtaacgatgaaaaccagtagcggacgtatgcctgtttatatattgcttactagatgttgtaatatttcacatgatgtagtgatagatatgatagacaaagataaaaaccacttatcgcatagagactattccaacctactactagagtatataaaatctcgttacatgttattgaaggaagaggatatcgatgagaacatagtatcaactttattagataagggaatcgatcctaactttaaacaagacggatatacagcgttacattattattatttgtgtctcgcacacgtttataaaccaggtgagtgtagaaaaccgataacgataaaaaaggccaagcgaattatttctttgtttatacaacatggagctaatctaaacgcgttagataattgtggtaatacaccattccatttgtatcttagtattgaaatgtgtaataatattcatatgactaaaatgctgttgacttttaatccgaatttcaaaatatgtaataatcatggattaacgcctatactatgttatataacttccgactacatacaacacgatattcttgttatgttaatacatcactatgaaacaaatgttggagaaatgccgatagatgagcgtcgtatgatcgtattcgagtttatcaaaacatattctacacgtcctgcagattcgataacttatttgatgaataggtttaaaaatataaatatttatacccgctatgaaggaaagacattattacacgtagcatgtgaatataataatacacaagtaatagattatcttatacgtatcaacggagatataaatgcgttaaccgacaataacaaacacgctacacaactcattatagataacaaagaaaattccccatataccattaattgtttactgtatatacttagatatattgtagataagaatgtgataagatcgttggtggatcaacttccatctctacctatcttcgatataaaatcatttgagaaattcatatcctactgtatacttttagatgacacattttacgataggcacgttaagaatcgcgattctaaaacgtatcgatacgcattttcaaaatacatgtcgttcgataaatacgatggtataataactaaatgtcacgacgaaacaatgttactcaaactgtccactgttctagacactacactatatgcagttttaagatgtcataattcgagaaagttaagaagatacctcaccgagttaaaaaaatataataacgataagtcctttaaaatatattctaatattatgaatgagagataccttaatgtatattataaagatatgtacgtgtcaaaggtatatgataaactatttcctgttttcacagataaaaattgtctactaacattactaccttcagaaattatatacgaaatattatacatgctgacaattaacgatctttataatatatcgtatccacctaccaaagtatagttgtatttttctcatgcgatgtgtgtaaaaaaactgatattatataaatattttagtgccgtataataaagatgacgatgaaaatgatggtacatatatatttcgtatcattatcattattgttattgctattccacagttacgccatagacatcgaaaatgaaatcacagaattcttcaataaaatgagagatactctaccagctaaagactctaaatggttgaatccagcatgtatgttcggaggcacaatgaatgatatggccactctaggagagccattcagtgcaaagtgtcctcctattgaagacagtcttttatcgcacagatataaagactatgtggttaaatgggagaggctagaaaagaatagacggcgacaggtttctaataaacgtgttaaacatggtgatttatggatagccaactatacatctaaattcagtaaccgtaggtatttgtgcaccgtaactacaaagaatggtgactgtgttcagggtatagttagatctcatattaaaaaacctccttcatgcattccaaaaacatatgaactaggtactcatgataagtatggcatagacttatactgtggaattctttacgcaaaacattataataatataacttggtataaagataataaggaaattaatatcgacgacattaagtattcacaaacgggaaaggaattaattattcataatccagagttagaagatagcggaagatacgactgttacgttcattacgacgacgttagaatcaagaatgatatcgtagtatcaagatgtaaaatacttacggttataccgtcacaagaccacaggtttaaactaatactagatccgaaaatcaacgtaacgataggagaacctgccaatataacatgcactgctgtgtcaacgtcattattgattgacgatgtactgattgaatgggaaaatccatccggatggcttataggattcgattttgatgtatactctgttttaactagtagaggcggtatcaccgaggcgaccttgtactttgaaaatgttactgaagaatatataggtaatacatataaatgtcgtggacacaactattattttgaaaaaacccttacaactacagtagtattggagtaaatatacaatgcatttttatatacattactgaattattattactgaattattattactgaattattattaattatatcgtatttgtgctatagaatggatgaagatacgcgactatctaggtatttgtatctcaccgatagagaacatataaatgtagactctattaaacagttgtgtaaaatatcagatcctaatgcatgttatagatgtggatgtacggctttacatgagtacttttataattatagatcagtcaacggaaaatacaagtatagatacaacggttactatcaatattattcatctagcgattatgaaaattataatgaatattattatgatgattatgatagaactggtatgaacagcgagagcgatagtgagagtgataatatatcaatcaaaacagaatatgagaatgaatatgaattctatgatgaaacacaagatcaaagtacacaacacaatgacttataaaaatactaaaactggagagactgattacacgtacctctctaatgggggttgcctgcatactatcgtaatggggtcgatggttgattattgattagtatattccttattcacacaaaaagaacatttttataaacatgaaaccactgtctaaatgtaattatgatcttgatttatagatgaagatcagcctttagaggattttaaccagtatgtttaatatgaaaaaaataaacataacatattttgagattaagcgctattgtgcttaattattttgctctataaactgaatatatagccacaattattgacgggcttgtttatgaccggcaatcatgaatttacagaaattatctctggctatatatcttactgcgacatgttcgtggtgttatgaaacatgcataagaaaaactgcgttgtatcatgacattcaattggagcatgtagaagacaataaagatagtgtagcgtcgctaccgtacaagtagtcaatcaaagagaacgtagtagattgttggctacatttaattggacagatatagctgagggtgttagaaatgagttcattaaaatatgtgatatcaacggaacatatttatataattatactattgctgttagtataattattgattccacggaagaactaccaacagttactccaattacaacaacatatgaaccttctacatataattatactatcgatgatagcactgttattactactgaagaactacaagtgactcctcatatggatctccatcgatgatacatgtattaaaatactttccgaataagtcttttaaatattgtattaattatgaaaaactatgctatgcgagtatgatgcaaagatgtttaatgatacgatactagattttatctctagcgagagatgtcgttagaatcatttatcataactacgtttaataataattcatcaacgaatatcgataacatgtgtcatttatacgttaaagtctgtccgtcttctctattgtttagactgtttgtagaatgctgtgatataaacaaactagtagaaggtacgactccgttacactgttatctaatgaatgaaggatttgaatcatctgttttaaaaaacctattaaaggagtatgtcatgaatacgtttaatgttcatgacatccattacacaaatatttaactcatgatgaagttgagaatgatatgctttctgatagtatagatagctttagctaatataaaaatatattaatccactatatattctagacttgatttaaaaccgataaactactactacgtactgtataagttgttaaaaaaaggagcagaccctaattatgtagatgatagaggtaatacttttcttcattacttctgcatctatatgtccacttatgagaaaacgtcattcaataagatgcatcgtgaaaagaaatttattaaagagttggtaaaatatgaaaccgaaagtaaataatataggaaatacacctctacataactacgtatctcaatatgatatcactctcattcctcatccacaacccattaaaaaaatggaaattaaagccctctattagcataaacggctacaggtctacctttacaatggcctttccttgtgcccagttcagaccctgtcattgccacgctactaaggactccctgaataccgtggccgacgtcagacattgtctgactgaatacatcctgtgggtttctcatagatggacccatagagaaagcgcagggtctctctacaggcttctcatctctttcagaactgatgcaacggagctctttggtggtgagttgaaggattcacttccgtgggacaatatcgacaattgcgtggagatcattaaatgtttcatcagaaatgactccatgaaaaccgccgaagaacttcgtgcaatcattggactttgtactcaatcagctatcgtctctggaagagtcttcaacgataagtatatcgacatactacttatgctgcgaaagattctgaacgagaacgactatctcaccctcttggatcatatccgcactgctaaatactaaatctccttcatgctctctcactacactttttatcatcttatgaggaatgattgccttcatcatttttcgtgaaataggaataattagcaccagaatagctatggattattgtggtagagagtgcactattctatgtcgtctactggatgaagatgtgacgtacaaaaaaataaaactagagattgaaacgtgtcacaacttatcaaaacatatagatagacgaggaaacaatgcgctacattgttacgtctccaataaatgcgatacagacattaagattgttcgactgttactctctcgcggagtcgagagactttgtagaaacaacgaaggattaactccgctaggagcatacagtaagcatagatacgtaaaatctcagattgtgcatctactgatatccagctattcgaattcctctaacgaactcaagtcgaatataaatgatttcgatctgtcttcggataatatcgacttacgtctgctaaaatacctaattgtggataaacggatacgtccgtccaagaatacgaattatgcaatcaatggtctcggattggtggatatatacgtaacgacgcctaatccgagaccagaagtattgctatggcttcttaaatcagaatgttacagcaccggttacgtatttcgtacctgtatgtacaacagtgatatgtgtaagaactctcttcattactatatatcgtctcatagagaatctcaatctctatccaaggatgtaattaaatgtttgatcaataacaatgtttccatccatggcagagacgaaggaggatctttacccatccaatactactggtctttctcaaccatagatatagagattgttaaattattattaataaaggatgtggacacgtgtagagtatacgacgtcagccctatattagaggcgtattatctaaacaagcgatttagagtaaccccatataatgtagacatggaaatcgttaatcttcttattgagagacgtcatactcttgtcgacgtaatgcgtagtattacttcgtacgattccagagaatataaccactacatcatcgataacattctaaagagatttagacaacaggatgaatccatcgtacaagccatgttgataaactacttacattacggcgatatggtcgttcgatgcatgttagataacggacaacaactatcctctgcacgactactttgttaataataatctcgtcgatgtaaacgtcgtaaggtttatcgtggaaaatatggacacgcggctgtaaatcacatatctaacaatggccgtctatgtatgtacggtctgatattatcgagatttaataattgcgggtatcactgttatgaaaccatactaatagatgtatttgatatactaagcaagtacatggatgatatagatatgatcgataatgagaataaaactctactatattacgcggtcgatgtcaataatatacaatttgcaaagcggttattggaatatggagcgagtgttacaacatcacgctcgataatcaatacggccatccagaaaagcagttaccaaagagaaaacaaaacgaggatagttgatttattacttagctaccatcccactctagagactatgattgacgcatttaatagagatatacgctatctatatcctgaaccattattcgcctgtatcagatacgccttaatcctagatgatgattttccttctaaagtaagtatgatatcgccggtcatcataaggaactaaagcgctatagagtagacattaatagaatgaagaatgcctacatatcaggcgtctccatgtttgatatattatttaaacgaagcaaacgccacagactgagatacgcaaagaatccgacatcaaatggtacaaaaaagaactaacgtccatcattacagaaactgtaaagaacagtgagaggatcgactccatagtggacaacattaatacagacgataacttgatttcgaaattacccatggagatactttattactccattaaataatttatcatggagtgataatgtcctgtttcatttgtttccatgacatattacaaaatcgattccgtccaagatgataaaaacatttaccggcatcataaacacggagtttattttatatgtctcgcataaacattactaaaaaaatatattgttctgtttttctttttctttttctttttctttcgtacatctctaattatgaaaaagtaaatgatgaaatgtatgagatgggcgagatggacgagattgtgagcatcgttcgcgacagtatgtggtacatacctaacgtatttatggacgacggtaagaatgaaggtcacgtttctgtcaacaatgtttgtcatatgtattttacgttctttgatgtggatacatcgtctcatctgtttaagctagttattaaacactgcgatctgaataaacgaggtaactctccattacattgctatacgatgaatacacgatttaatccatctgtattaaagatattgttacaccacggcatgcgtaactttgatagcaaggatgaaaaaggacaccactatctgattcattcactatcaatcgataacaagatctttgatatactaacggacaccattgatgactttagtaaatcatccgatctattgctgtgttatcttagatataaattcaatgggagcttaaactactacgttctgtacaaaggatccgaccctaattgcgccgacgaggatgaactcacttctcttcattactactgtaaacacatatccacgttctacaaaagcaattattacaagttaagtcacactaagatgcgagccgagaagcgattcatctacgcgataatagattatggagcaaacattaacgcggttacacacttaccttcaacagtataccaaacatagtcctcgtgtggtgtatgctcttttatctcgaggatacgtaataatcttgattgtacacccatcatggaacgattgtgcaacaggtcatattctcataatgttactcaattggcacgaacaaaaggaagaaggacaacatctactttatctattcataaaacataatcaaggatacactctcaatatactacggtatctactagataggttcgacattcagaaagacgaatacatataccgcctttcaaaattgtaacaacaatgttgcctcatacatcggatacgacatcaaccttccgactaaagacggtattcgacttggtgtttgaaaacagaaacatcatatacaaggcggatgttgtgaatgacatcatccaccacagactgaaagtatctctacctatgattaaatcgttgttctacaagatgtcagaattctctccctacgacgattactacgtaaaaaagatactagcctactgcctattaagggacgagtcattcgcggaactacatagtaaattctgtttaaacgaggactataaaagtgtatttatgaaaaatatatcattcgataagatagattccatcatcgtgacataagtcgcctcaaagagattcgaatctccgacaccgacctgtatacggtatcacagctatcttgaagccatacattcggacagacacatttcatttcccatgtacgacgatctcatagaacagtgccatctatcgatggagcgtaaaagtaaactcgtcgacaaagcactcaataaattagagtctaccatcggtcaatctagactatcgtatttgcctccggaaattatgcgcaatatcatctaaacagtatgttgtacggaaagaaccattacaaatattatccatgatagaaagaaaatatctatatgattggagaagtaggaaacaggaacacgacaacgattactacattattaaattatgaagtccgtattatactcgtatatattgtttctctcatgtataataataaacggaagagatatagcaccgcatgcaccatccgatggaaagtgtaaagacaacgaatacaaacgccataatttgtgtccgggaacatacgcttccagattatgcgatagcaagactaacacacaatgtacgccgtgtggttcgggtaccttcacatctcgcaataatcatttacccgcttgtctaagttgtaacggaagacgcgatcgtgtaacactactcacaatagaatctgtgaatgctctcccggatattattgtcttctcaaaggatcatccggatgcaaggcatgtgtttcccaaacaaaatgtggaataggatacggagtatccggagacgtcatctgttctccgtgtggtctcggaacatattctcacaccgtctcttccgcagataaatgcgaacccgtacccagaaatacctttaactatatcgatgtggaaattaatctgtatcccgtcaacgacacgtcgtgtactcggacgaccactaccggtctcagtgaatccatctcaacgtcggaactaactattactatgaatcataaagactgtaatcccgtatttcgtgatggatacttctccgttcttaataaggtagcgacttcaggattctttacaggagaaaggtgtgcactctgaatttcgagattaaatgcaataacaaagattcttcctccaaacagttaacgaaagcaaagaatgatgacggtatcatgccgcattcggagactgtatatctagcgtcgacatctatatactatatagtaataccaatactcaagactacgaaactgatacaatctcttatcatgtgggtaatgttctcgatgtcgatagccatatgcccggtagttgcgatatacataaactgatcactaattccaaacccacccgctttttatagtaagtttttcacccataaataataaatacaataattaatttctcgtaaaagtagaaaatatattctaatttattgcatggtaaggaagtagaatcataaagaacagtactcaatcaatagcaattatgaaacaatatatcgtcctggcatgcatgtgcctgccagtcttcagcaatcatcctcatcctcctcctcgtgtacggaagaagaaaacaaacatcatatgggaatcgatgttattatcaaagtcacaaagcaagaccaaacaccgaccaatgataagatttgccaatccgtaacggaaattacagagtccgagtcagatccagatcccgaggtggaatcagaagatgattccacatcagtcgaggatgtagatcctcctaccacttattactccatcatcggtggaggtctgagaatgaactttggattcaccaaatgtcctcagattaaatccatctcagaatccgctgatggaaacacagtgaatgctagattgtccagcgtgtccccaggacaaggtaaggactctcccgcgatcactcgtgaagaagctctggctatgatcaaagactgtgaggtgtctatcgacatcagatgtagcgaagaagagaaagacagcgacatcaagacccatccagtactcgggtctaacatctctcataagaaagtgagttacgaagatatcatcggttcaacgatcgtcgatacaaaatgtgtcaagaatctagagtttagcgttcgtatcggagacatgtgcaaggaatcatctgaacttgaggtcaaggatggattcaagtatgtcgacggatcggcatctgaaggtgcaaccgatgatacttcactcatcgattcaacaaaactcaaagcgtgtgtctgaatcgataactctattcatctgaaattggatgagtagggttaatcgaacgattcaggcacaccacgaattaaaaaagtgtaccggacactatattccggtttgcaaaacaaaaatgttcttaactacattcacaaaaagttacctctcgttacttcttctttttctgtctcaatagtgtgatacgattatgacactattcctattcctattcctatttcctttcagggtatcacaaaaatattaaacctctttctgatggtctcataaaaaaagttttacaaaaatatttttattctctttctctctttgatggtctcataaaaaaagttttacaaaaatatttttattctctttctctctttgatggtctcataaaaaaagttttacaaaaatatttttattctctttctctctttgatggtctcataaaaaaagttttacaaaaatatttttattctctttctctctttgatggtctcataaaaaaagttttacaaaaatatttttattctctttctctctttgatggtctcataaaaaaagttttacaaaaatatttttattctctttctctctttgatggtctcataaaaaaagttttacaaaaatatttttattctctttctctcttcgatggtctcacaaaaaaagttttacaaaaatatttttattctctttctctctttgatggtctcataaaaaaagttttacaaaaatatttttattctctttctctctttgatggtctcataaaaaatattaaacctctttctgatggtgtcactaaaatatttttattctcattctcattttctctttctctcttcaatggagtcataaaatatttttattctctttctctcttcgatggtctcacaaaaatattaaacctctttctgatggtgtcactaaaatatttttattctcattctcattttctctttctctcttcaatggagtcataaaatatttttattctctttctctcttcgatggtctcacaaaaatattaaacctctttctgatggagtcgtaaaaaagttttatctctttctctcttcgatggtctcactaaaatattttttattctctttctgatgcatcaactatttcttaaacaataacgtccaacaacatatactcgtcgagcttatcaacatcccctatgcccatctaggttaccagacaattgtatatcataaaataatgtttataatttacacgttaaaatcatataataaaacgtagatcgtataatattttttggtatataaatgatctagtaaaatccatgtaggggatactgctcacattttttctttggtacaaaatttcacacaagtttttatacagacaaattcttgtccatatattttaaaacattgacttttgtactaagaaaaatatctagactaactatctctttctctttctctcttcgatggtctcacaaaaatattaaacctctttctgatggagtcgtaaaaaagttttatctctttctctcttcgatggtctcacaaaaatattaaacctctttctgatggagtcgtaaaaaagttttatctctttctctcttcgatggtctcacaaaaatattaaacctctttctgatggagtcgtaaaaaagttttatctttctctcttcgatggtctcacaaaaatattaaacctctttctgatggagtcgtaaaaaagttttatctctttctctcttcgatggtctcacaaaaatattaaacctctttctgatggagtcgtaaaaaagttttatctctttctctcttcgatggtctcacaaaaatattaaacctctttctgatggagtcgtaaaaaagttttatctctttctctcttcgatggtctcacaaaaatattaaacctctttctgatggagtcgtaaaaaagttttatctctttctctcttcgatggtctcacaaaaatattaaacctctttctgatggagtcgtaaaaaagttttatctctttctctcttcgatggtctcacaaaaatattaaacctctttctgatggagtcgtaaaaaagttttatctctttctctcttcgatggtctcacaaaaatattaaacctctttctgatggagtcgtaaaaaagttttatctctttctctcttcgatggtctcacaaaaatattaaacctctttctgatggagtcgtaaaaaagttttatctctttctctcttcgatggtctcacaaaaatattaaacctctttctgatggagtcgtaaaaaagttttatctctttctctcttcgatggtctcacaaaaatattaaacctctttctgatggagtcgtaaaaaagttttatctctttctctcttcgatggtctcacaaaaatattaaacctctttctgatggagtcgtaaaaaagttttatctctttctctcttcgatggtctcacaaaaatattaaacctctttctgatggagtcgtaaaaaagttttatctctttctctcttcgatggtctcacaaaaatattaaacctctttctgatggagtcgtaaaaaagttttatctctttctctcttcgatggtctcacaaaaatattaaacctctttctgatggagtcgtaaaaaagttttatctctttctctcttcgatggtctcacaaaaatattaaacctctttctgatggagtcgtaaaaaagttttatctctttctctcttcgatggtctcacaaaaatattaaacctctttctgatggagtcgtaaaaaagttttatctctttctctcttcgatggtctcacaaaaatattaaacctctttctgatggagtcgtaaaaaagttttatctctttctctcttcgatggtctcacaaaaatattaaacctctttctgatggagtcgtaaaaaagttttatctctttctctcttcgatggtctcacaaaaatattaaacctctttctgatggagtcgtaaaaaagttttatctctttctctcttcgatggtctcacaaaaatattaaacctctttctgatggagtagtcgtaaaaaagttttatctctttctctcttcgatggtctcacaaaaatattaaacctctttctgatggagtcgtaaaaaagttttatctctttctctcttcgatggtctcacaaaaatattaaacctctttctgatggagtcgtaaaaaagttttatctctttctctcttcgatggtctcacaaaaatattaaacctctttctgatggagtcgtaaaaaagttttatctctttctctcttcgatggtctcacaaaaatattaaacctctttctgatggagtcgtaaaaaagttttatctctttctccttcgatggtctcacaaaaatattaaacctctttctgatggagtcgtaaaaaagttttatctctttctccttcgatggtctcacaaaaatattaaacctctttctgatggagtcgtaaaaaagttttatctctttctcctttctcacaaaaatattaaacctctttctgatggagtcgtaaaaaagttttatctctttctcctttctcacaaaaatattaaacctctttctgatggagtctccttcgatggtctcacaaaaatattaaacctctttctgatggagtcgtaaaaaagttttatctctttctccttcgatggtctcacaaaaatattaaacctctttctgatggagtcgtaaaaaagttttatctctttctccttcgatggtctcacaaaaatattaaacctctttctgatggagtcgtaaaaaagttttatctctttctccttcgatggtctcacaaaaatattaaacctctttctgatggagtcgtaaaaaagttttatctctttctcctttctcacaaaaatattaaacctctttctgatggagtcgtaaaaaagttttatctctttctccttcgatggtctcacaaaaatattaaacctctttctgatggagtcgtaaaaaagttttatctctttctccttcgatggtctcacaaaaatattaaacctctttctgatggagtcgtaaaaaagttttatctctttctccttcgatggtctcacaaaaatattaaacctctttctgatggtctctataaagcgattgatttttcttaccctctagagtttcctacggtcgttggtcacacatttttttctagacactaaataaatagtaaaattaaattaattataaaattatgtatatgatttactaactttagttagataagttagtaatacataaattttagtatattaatattatattttaaa

SEQ ID NO: 12 - protein, 193 aa, Homo sapiens
  Erythropoietin
MGVHECPAWLWLLLSLLSLPLGLPVLGAPPRLICDSRVLERYLLEAKEAENITTGCAEHCSLNENITVPDTKVNFYAWKRMEVGQQAVEVWQGLALLSEAVLRGQALLVNSSQPWEPLQLHVDKAVSGLRSLTTLLRALGAQKEAISPPDAASAAPLRTITADTFRKLFRVYSNFLRGKLKLYTGEACRTGDR

SEQ ID NO: 13 - protein, 272 aa, Artificial Sequence
  anti-VEGF single chain GLAF-1
METDTLLLWVLLLWVPGSTGDEVQLVESGGGLVQPGGSLRLSCAASGFTISDYWIHWVRQAPGKGLEWVAGITPAGGYTYYADSVKGRFTISADTSKNTAYLQMNSLRAEDTAVYYCARFVFFLPYAMDYWGQGTLVTVSSGGGGSGGGGSGGGGSDIQMTQSPSSLSASVGDRVTITCRASQDVSTAVAWYQQKPGKAPKLLIYSASFLYSGVPSRFSGSGSGTDFTLTISSLQPEDFATYYCQQGYGNPFTFGQGTKVEIKRDYKDDDDK

SEQ ID NO: 14 - protein, 121 aa, Homo sapiens
  Human plasminogen kringle 5 domain
MYRMQLLSCIALSLALVTNSPVVLLPDVETPSEEDCMFGNGKGYRGKRATTVTGTPCQDWAAQEPHRHSIFTPETNPRAGLEKNYCRNPDGDVGGPWCYTTNPRKLYDYCDVPQCAAPSFD

SEQ ID NO: 15 - protein, 264 aa, Artificial Sequence
  human tissue factor-alphavbeta3-integrin RGD fusion protein
METPAWPRVPRPETAVARTLLLGWVFAQVAGASGTTNTVAAYNLTWKSTNFKTILEWEPKPVNQVYTVQISTKSGDWKSKCFYTTDTECDLTDEIVKDVKQTYLARVFSYPAGNVESTGSAGEPLYENSPEFTPYLETNLGQPTIQSFEQVGTKVNVTVEDERTLVRRNNTFLSLRDVFGKDLIYTLYYWKSSSSGKKTAKTNTNEFLIDVDKGENYCFSVQAVIPSRTVNRKSTDSPVECMGQEKGEFRGRGDSPDYKDDDDK

SEQ ID NO: 16 - protein, 207 aa, Artificial Sequence
  interleukin-24
MNFQQRLQSLWTLASRPFCPPLLATASQMQMVVLPCLGFTLLLWSQVSGAQGQEFHFGPCQVKGVVPQKLWEAFWAVKDTMQAQDNITSARLLQQEVLQNVSDAESCYLVHTLLEFYLKTVFKNYHNRTVEVRTLKSFSTLANNFVLIVSQLQPSQENEMFSIRDSAHRRFLLFRRAFKQLDVEAALTKALGEVDILLTWMQKFYKL

SEQ ID NO: 17 - protein, 520 aa, Artificial Sequence
  SIL-6R/IL-6 fusion protein
MLAVGCALLAALLAAPGAALAPRRCPAQEVARGVLTSLPGDSVTLTCPGVEPEDNATVHWVLRKPAAGSHPSRWAGMGRRLLLRSVQLHDSGNYSCYRAGRPAGTVHLLVDVPPEEPQLSCFRKSPLSNVVCEWGPRSTPSLTTKAVLLVRKFQNSPAEDFQEPCQYSQESQKFSCQLAVPEGDSSFYIVSMCVASSVGSKFSKTQTFQGCGILQPDPPANITVTAVARNPRWLSVTWQDPHSWNSSFYRLRFELRYRAERSKTFTTWMVKDLQHHCVIHDAWSGLRHVVQLRAQEEFGQGEWSEWSPEAMGTPWTESRSPPARGGGGSGGGGSVEPVPPGEDSKDVAAPHRQPLTSSERIDKQIRYILDGISALRKETCNKSNMCESSKEALAENNLNLPKMAEKDGCFQSGFNEETCLVKIITGLLEFEVYLEYLQNRFESSEEQARAVQMSTKVLIQFLQKKAKNLDAITTPDPTTNASLLTKLQAQNQWLQDMTTHLILRSFKEFLQSSLRALRQM

SEQ ID NO: 18 - DNA, 194908 bp, Artificial Sequence
  GLV-1h64
ttatgagaccatcaaagagagaaagagaataaaaatatttttgtaaaactttttttatgagaccatcaaagagagaaagagaataaaaatatttttgtaaaacttttttatgagaccatcaaagagagaaagagaataaaaatatttttgtaaaacttttttatgagaccatcaaagagagaaagagaataaaaatatttttgtaaaactttttttatgagaccatcaaagagagaaagagaataaaaatatttttgtaaaactttttttatgagaccatcaaagagagaaagagaataaaaatatttttgtaaaactttttttatgagaccatcaaagagagaaagagaataaaaatatttttgtaaaactttttttatgagaccatcaaagagagaaagagaataaaaatatttttgtaaaactttttttatgagaccatcaaagagagaaagagaataaaaatatttttgtaaaactttttttatgagaccatcaaagagagaaagagaataaaaatatttttgtaaaactttttttatgagaccatcaaagagagaaagagaataaaaatatttttgtaaaactttttttatgagaccatcaaagagagaaagagaataaaaatatttttgtaaaactttttttatgagaccatcaaagagagaaagagaataaaaatatttttgtaaaactttttttatgagaccatcaaagagagaaagagaataaaaatatttttgtaaaactttttttatgagaccatcaaagagagaaagagaataaaaatatttttgtaaaactttttttatgagaccatcagaaagaggtttaatatttttgtgatactctgaaaggaaataggaataggaataggaatagtgtcataatcgtatcacactattgagacagaaaaagaagaagtcgcgagaggtaactttttgtgaatgtagttaagaacatttttgttttgcaaaccggaatatagtgtccggtacacttttttaattcgtggtgtgcctgaatcgttcgattaaccctactcatccaatttcagatgaatagagttatcgattcagacacacgctttgagttttgttgaatcgatgagtgaagtatcatcggttgcaccttcagatgccgatccgtcgacatacttgaatccatccttgacctcaagttcagatgattccttgcacatgtctccgatacgaacgctaaactctagattcttgacgcattttgtatcgacgatcgttgaaccgatgatatcttcgtaactcactttcttatgagagatgttagacccgagtactggatgggtcttgatgtcgctgtctttctcttcttcgctacatctgatgtcgatagacacttcacagtctttgatcatagcaagagcttcttcatgagtgatcgcgggagagtccttaccttgtcctggggacacgctggacaatctagcattcactgtgtttccatcagcggattctgagatggatttaatctgaggacatttggtgaatccaaagttcattctcagacctccaccgatgatggagtaataagtggtaggaggatctacatcctcgactgatgtggaatcatcttctgattccacctcgggatctggatctgactcggactctgtaatttccgttacggattggcaaatcttatcattggtcggtgtttggtcttgctttgtgactttgataataacatcgattcccatatgatgtttgttttcttcttccgtacacgaggaggaggatgaggatgattgctgaagactggcaggcatagcagctgccgccaggcacatgcatgccaggacgatatattgtttcataattgctattgattgagtactgttctttatgattctacttccttaccgtgcaataaattagaatatattttctacttttacgagaaattaattattgtatttattatttatgggtgaaaaacttactataaaaagtgggtgggtttggaattagtgatcagtttatgtatatcgcaactaccgggcatatggctatcgacatcgagaacattacccacatgataagagattgtatcagtttcgtagtcttgagtattggtattactatatagtatatagatgtcgcccactagagttactgtctccgaatgcggcatgatagtatcattctttgctttcgttaactgtttggaggaagaatctttgttattgcatttaatctcgaaattcagagtgcacacctttctcctgtaaagaaacctgaagtcgctaccttattaagaacggagaagtatccatcacgaaatacgggattacagtctttatgattcatagtaatagttagttccgacgttgagatggattcgctgagaccggtagtggtcgtccgagtacacgacgtgtcgttaactggatacaggttaatttccacatcgatatagttaaacgtatttctgggtacgggttcgcatttatctgcggaagagacggtgtgagaatatgttccgagaccacacggagaacagatgacgtctccggatactccgtatcctattccacattttgtttgggaaacacatgccttgcatccggatgatcctttgagaagacaataatatccgggagagcattcacagattctattgtgagtcgtgttacacgatcgcgtcttccgttacaacttagacaagcgggtaaatgattattgcgagatgtgaaggtacccgaaccacacggcgtacatcgtgtgttagtcttgctatcgcataatctggaagcgtatgttcccggacacaaattatggcgtttgtattcgttgtctttacactttccatcggatggtgcatgcggtgctatatctcttccgtttattattatacatgagagaaacaatatatacgagtataatacggacttcatgatttaataatgtagtaatcgttgtcttgttcctgtttcctacttctccaatcatatagatattttctttctatcatggataatatttgtaatggttctttccgtacaacatactgtttagatgatattgcgcataatttccggaggcaaatacgatagtctagattgaccgatggtagactctaatttattgagtgctttgtcgacgagtttacttttacgctccatcgatagatggcactgttctatgagatcgtcgtacatgggaaatgaaatgtgactgtctgaatgtatggctttaagatagctgtgataccgtatacaggtcggtgtcggagattcgaatctctttgaggcgacttatgtcacgatgatggaatctatcttatcgaatgatatatttttcataaatacacttttatagtcctcgtttaaacagaatttactatgtagttccgcgaatgactcgtcccttaataggcagtaggctagtatcttttttacgtagtaatcgtcgtagggagagacatcttgtagaacaacgatttcgttttgttttctcttctgtaactgcttttctggatggccgtattgattatcgagcgtgatactcgctccatattccaataaccgctttgcaaattgtatattattgacatcgaccgcgtaatatagtagagttatcgatcatatctatatcatccatgtacttgcttagtatatcaaatacatctatcagtatggtttcataacagtgatacccgcaattattaaatctcgataatatcagaccgtacatacatagacggccattgttcgatacgtgatttacagccgcgtgtccatattttccacgataaaccttacgacgtttacatcgacgagattattattaacaaagtagtcgtgtagaggatagttgttgtccgttatctaacatgcatcgaacgaccatatcgccgtaatgtaagtagtttatcagtatggcttgtacgatggattcatcctgttgtctaaatctctttagaatgttatcgatgatgtagtggttatattctctggaatcgtacgaagtaatactacgcattacgtcgacaagagtatgacgtctctcaataagaagattaacgatttccatgtctacattatatggggttactctaaatcgcttgtttagataatacgcctctaatatagggctgacgtcgtatactctacacgtgtccacatcctttattaataataatttaacaatctctatatctatggttgagaaagaccagtagtattggatgggtaaagatcctccttcgtctctgccatggatggaaacattgttatcgatcaaacatttaattacatccttggatagagattgagattctctatgagacgatatatagtaatgaagagagttcttacacatatcactgtcgtacatacaggtacgaaatacgtaaccggtgctgtaacattctgatttaagaagccatagcaatacttctggtctcggattaggcgtcgttacgtatatatccaccaatccgagaccattgattgcataattcgtattcttggacggacgtatccgtttatccacaattaggtattttagcagacgtaagtcgatattatccgaatacagatcgaaatcatttatattcgacttgagttcgttagaggaatttgaatagctggatatcagtagatgcacaatctgagattttacgtatctatgcttactgtatactcctagcggagttaatccttcgttgtttctacaaagtctctcgactccgcgagagaacaatcttaatgtctgtatcgcatttattggagacgtaacaatgtagcgcattgtttcctcgtctatctatatgttttgataagttgtgacacgtttcaatttctagttttatttttttgtacgtcacatcttcatccagtagacgacatagaatagtgcactctctaccacaataatccatagctattctggtgctaattattcctatttcacgaaggcaatcattcctcataagatgataaaaagtgtagtggagatttagtatttagcagtgcggatatgatccaagagggtgagatagtcgttctcgttcagaatctttcgcagcataagtagtatgtcgatatacttatcgttgaagactctttataaaagtctatttgtttatatttattgcggatagcagtatttccctataaaaagtatacgtcctgtggtgtctttaatcatgtacatgaatggatggtttatgtagaccttcgtacgatataccatcgaaaagttaatcgtaaatactcctgtaacggccgatgcttctgtatactcctcattaacatctataaacgtcgtatgtagaaatttttctacagtgatagtttcattacacatcttgctaaaatctgcataatatccgaatatattagtaagtcctaaattttctaaaatcggtaccagattatacggttctgtcatttccactttaaactttggcatatacaagtctatacttttagtagataacataccacaccattttttaaatttttcatctgttatatttttttctatgttatatataccttctatgtcgtccggtagtataattaccatactagagtttccctcgtatggaatatcgataatagagaatcctccgaataattcattaatatgtacatattgcaagttattctcggtacccaccatcatatcaacgctggtaactatattcttagaaatataaaacttgtctgtatatgtaagatgtttagaaaatggatatttccacattgctttaaaatggacggcgctaacaactgtcatacgagtattaatggatagcggactagtcaataaggaattaattttaccatttgtcattgtcttaacccattcgttgattagttcctttgtttggttagcattattaaagtttacagtttgaaaatcgtcttttattttttgtaggaaggaggcgtggaactcgatactatcgctaccgtatattttatttgcggtagctagtgtcgcacaatacggaatatctacctccatgtcatcattattgtcatcgggtgtattctcattcatattctctatatattttgatagttgttcagctgtagaaccagctgctccatgatttagaatagataaagtagataaaatggaaactggagaaatcaaaacattttcatcagggtgttttaagattagttctttaaagatatccatggtatagacctaacgataacgatatatatcataaataaataatgttaaatttcaatttatgtttgtaccccgtattcatacttaacaaattggtattgcgtacacaatcaatcatattacataccattaataatgcaagcataaaaaattgttagtagatgtttctaaatataggttccgtaagcaaagaatataagaatgaagcggtaatgataaaatcaatcgttatctaaaatgatcatactcatttattttattctattatattaacacatacatttttaacagcaacacattcaatattgtattgttatttttatattatttacacaattaacaatatattattagtttatattactgaattaataatataaaattcccaatcttgtcataaacacacactgagaaacagcataaacacagaatccatcaaaaatgttgataaattatctgatgttgttgttcgctgctatgataatcagatcattcgccgatagtggtaacgctatcgaaacgacattgccagaaattacaaacgctacaacagatattccagctatcagattatgcggtccagagggagatggatattgtttacacggtgactgtatccacgctagagatattgacggtatgtattgtagatgctctcatggttatacaggcattagatgtcagcatgtagtattagtagactatcaacgttcagaaaacccaaacactacaacgtcatatatcccatctcccggtattatgcttgtattagtaggcattattatgtgttgtctattatctgtttataggttcactcgacgaactaaactacctatacaagatatggttgtgccataatttttataaatttttttatgagtatttttacaaaaatgtataaagtgtatgtcttatgtatatttataaaaatgctaagtatgcgatgtatctatgttatttgtatttatctaaacaatacctctacctctagatattatacaaaaattttttatttcggcatattaaagtaaaatctagttaccttgaaaatgaatacagtgggtggttccgtatcaccagtaagaacataatagtcaaatacagtatccgattgagattttgcatacaatactagtctagaaagaaatttgtaatcatcttctgtgacgggagtccatatatctgtatcatcgtctagtttatcagtgtcccatgctatattcctgttatcatcattagttaatgaaaataactctcgtgcttcagaaaagtcaaatattgtatccatacatacatctccaaaactatcgcttatacgtttatctttaacgatacctatacctagatggttatttactaacagacattttccagatctattgactataactcctatagtttccacatcaaccaagtaatgatcatctattgttatataacaataacataactcttttccatttttatcagtatgtatatctatatcaacgtcgtcgttgtagtgaatagtagtcattgatctattatatgaaacggatatgtctagaacggcaattgttttacgtccagttaacactttcgttgatttaaagtctagagtctttgcaaacataatatccttatccgactttatatttcctgtagggtggtataattttattttgcctccacatatcggtgtttccaaatatattactagacaatattccatatagttattagttaagggtacccaattagaacacgtacgcttattatcatcatttggatcgtatttcataaaagttattgtgttatcgatgtcaacacattctacattttttaatcgtctatatagtatttttctgatattttctataatatcagaattgtcttccatcggaagttgtatactatcggaatcagttacatgtttaaataattctctgatgtcattccttatacaatcaaattcattattaaacagtttaatagtctgtagacctttatcgtcgtaaatatccattgtcttattagttacgcttatttttatgtgtttttacgttgctttattatattttataagaatgattgtttgacgaatcacgagaactattaagacacattattaggtatatattataaaaaagtttttgattacgatgttataagaggaaagaggacacattaacatcatacatcaattaactacattcttataacatcgtaatcaaaagaattgcaattttgatgtataacaactgtcaatgggttatggaattgtatattacatattatacggtatgttggtaacgacaaataccggtcggtaattgtctgccggtgtaatagaattatatatatctatctattacaccggccttgtatacataataataagttgtggtagtatgatctccatatttataatttaggactttgtattcagtatttttggaatcataaaaaataaaaaaaagttttactaatttaaaatttaaaaagtatttacatttttttcactgtttagtcgcggatatggaattcgatcctgccaaaatcaatacatcatctatagatcatgtaacaatattacaatacatagatgaaccaaatgatataagactaacagtatgcattatccgaaatattatatcaatatcacaaaaataaatacacatttggctaatcaatttcgggcttggaaaaaacgtatcgccggaagggactatatgactaacttatctagagatacaggaatacaacaatcaaaacttactgaaactatacgtaactgtcaaaaaaatagaaacatatatggtctatatatacactacaatttagttattaattggataaccgatgtgattatcaatcaatattaagagggttggtaaattggtacatagctaataatacctatactccaaatacacccaataatacaacaaccatttctgagttggatatcatcaaaatactaaataaatacgaggacgtgtatagagtaagtaaagaaaaagaatgtggaatttgctatgaagttgtttactcaaaacgatagatactttggtttattggattcgtgtactcatatattttgcataacatgcatcaatatatggcatagaacacgaagagaaaccggtgcgtcggataattgtcctatatgccgtacccgttttagaaacataacaatgagcaagttctataagctagttaactaataaataaaaagtttaatttgttgacgacgtatgtcgttattttttctcgtataaaagattaatttgattctaatataatctttagtattggataaatatcaattcaaattaattccattagattatatcataaataaaaatagtagcacacaactacttcagcaaacattctttttataaatgccatctagcgtagcgaggacacaagtgaacctataattatcaaatttattagtatcagtcacatgaaggactttacgtagagtgacgattccactatctgtggtacgaacggtttcatcttctttgatgccatcacccagatgttctataaacttggtatcctcgtccgatttcatatcctttgccaaccaatacatatagctaaactcaggcatatgttccacacatcctgaacaatgaaattctccagaagatgttacaatgtctagatttggacatttggtttcaaccgcgttaacatatgagtgaacacacccatacatgaaagcgatgagaaataggattctcatcttgccaaaatatcactagaaaaaatttatttatcagttttaaaggtataaaaaatacttattgttgctcgaatattttgtatttgatggtatacggaagattagaaatgtaggtattatcatcaactgattctatggttttatgtattctatcatgtttcactattgcgttggaaataatatcatatgcttccacatatattttattttgttttaactcataatactcacgtaattctggattattggcatatctatgaataattttagctccatgatcagtaaatattaatgagaacatagtattaccacctaccattatttttttcatctcattcaattcttaattgcaaagatctatataatcattatagcgttgacttatggactctggaatcttagacgatgtacagtcatctataatcatggcatatttaatacattgttttatagcatagtcgttatctacgatgttagatatttctctcaatgaatcaatcacacaatctaatgtaggtttatgacataatagcattttcagcagttcaatgtttttagattcgttgatggcaatggctatacatgtatatccgttatttgatctaatgttgacatctgaaccggattctagcagtaaagatactagagattgtttattatatctaacagccttgtgaagaagtgtttctcctcgtttgtcaatcatgttaatgtctttaagataaggtaggcaaatgtttatagtactaagaattgggcaagcataagacatgtcacaaagacccttttttgtatgtataagtgtaaaaattataacatccatagttggatttacataggtgtccaatcgggatctctccatcatcgagataattgatggcatctcccttccttttttagtagatatttcatcgtgtaagaatcaatattaatatttctaaagtatccgtgtatagcctctttatttaccacagctccatattccactagagggatatcgccgaatgtcatatactcaattagtatatgttggaggacatccgagttcattgttttcaatatcaaagagatggtttccttatcatttctccatagtggtacaatactacacattattccgtgcggctttccattttccaaaaacaatttgaccaaatctaaatctacatctttattgtatctataatcactatttagataatcagccataattcctcgagtgcaacatgttagatcgtctatatatgaataagcagtgttatctattcctttcattaacaatttaacgatgtctatatctatatgagatgacttaatataatattgaagagctgtacaatagtttttatctataaaagacggcttgattccgtgattaattagacatttaacaacttccggacgcacatatgctctcgtatccgactctgaatacagatgagagatgatatacagatgcaatacggtaccgcaatttcgtagttgataatcatcatacgcgtatcagtactcgtcctcataaagaacactgcagccattttctatgaacaaatcaataattttagaaacaggatcattgtcattacataattttctataactgaacgatggttttcacatttaacactcaagtcaaatccatgttctaccaacacctttatcaagtcaacgtctacatttttggatttcatatagctgaatatattaaagttatttatgttgctaaatccagtggcttctagtagagccatcgctatatccttattaactttaacatgtctactatttgtgtattcttctaatggggtaagctgtctccaatttttgcgtaatggattagtgccactgtctagtagtagtttgacgacctcgacattattacaatgctcattaaaaaggtatgcgtgtaaagcattattcttgaattggttcctggtatcattaggatctctgtctttcaacatctgtttaagttcatcaagagccacctcctcattttccaaatagtcaaacattttgactgaatgagctactgtgaactctatacacccacacaactaatgtcattaaatatcatgtcaaaaacttgtacaattattaataaaaataatttagtgtttaaattttaccagttccagattttacacctccgttaatacctccattaaccccactggacgatcctcctccccacattccaccgccaccagatgtataagttttagatcctttattactaccatcatgtccatggataaagacactccacatgccgccactaccccctttagaagacatattaataagacttaaggacaagtttaacaataaaattaatcacgagtaccctactaccaacctacactattatatgattatagtttctatttttacagtaccttgactaaagtttctagtcacaagagcaatactaccaacctacactattatatgattatagtttctatttttataggaacgcgtacgagaaaatcaaatgtctaatttctaacggtagtgttgataaacgattgttatccgcggatacctcctctatcatgtcgtctattttcttactttgttctattaacttattagcattatatattatttgattataaaacttatattgcttattagcccaatctgtaaatatcggattattaacatatcgtttctttgtaggtttatttaacatgtacatcactgtaagcatgtccttaccatttattttaatttgacgcatatccgcaatttctttttcgcagtcggttataaattctatatatgatggatacatgctacatgtgtacttataatcgactaatatgaagtacttgatacatattttcagtaacgatttattattaccacctatgaataagtacctgtgatcgtctaggtaatcaactgttttcttaatacattcgatggttggtaatttactcagaataatttccaatatcttaatatataattctgctatttctgggatatatttatctgccagtataacacaaatagtaatacatgtaaacccatattttgttattatattaatgtctgcgccattatctattaaccattctactaggctgacactatgcgactcaatacaatgataaagtatactacatccatgtttatctattttgtttatatcatcaatatacggcttacaaagttttagtatcgataacacatccaactcacgcatagagaaggtagggaataatggcataatatttattaggttatcatcattgtcattatctacaactaagtttccattttttaaaatatactcgacaactttaggatctctattgccaaatttttgaaaatatttatttatatgcttaaatctatataatgtagctccttcatcaatcatacatttaataacattgatgtatactgtatgataagatacatattctaacaatagatcttgtatagaatctgtatatcttttaagaattgtggatattaggatattattacataaactattacacaattctaaaatataaaacgtatcacggtcgaataatagttgatcaactatataattatcgattttgtgatttttcttcctaaactgtttacgtaaatagttagatagaatattcattagttcatgaccactatagttactatcgaataacgcgtcaaatatttcccgtttaatatcgcatttgtcaagataataatagagtgtggtatgttcacgataagtataataacgcatctctttttcgtgtgaaattaaatagtttattacgtccaaagatgtagcataaccatcttgtgacctagtaataatataataatagagaactgttttacccattctatcatcataatcagtggtgtagtcgtaatcgtaatcgtctaattcatcatcccaattataatattcaccagcacgtctaatctgttctattttgatcttgtatccatactgtatgttgctacatgtaggtattcctttatccaataatagtttaaacacatctacattgggatttgatgttgtagcgtatttttctacaatattaataccatttttgatactatttatttctatacctttcgaaattagtaatttcaataagtctatattgatgttatcagaacatagatattcgaatatatcaaaatcattgatatttttatagtcgactgacgacaataacaaaatcacaacatcgtttttgatattattatttttcttggtaacgtatgcctttaatggagtttcaccatcatactcatataatggatttgcaccactttctatcaatgattgtgcactgctggcatcgatgttaaatgttttacaactatcatagagtatcttatcgttaaccatgattggttgttgatgctatcgcattttttggtttctttcatttcagttatgtatggatttagcacgtttgggaagcatgagctcatatgatttcagtactgtagtgtcagtactattagtttcaataagatcaatctctagatctatagaatcaaaacacgataggtcagaagataatgaatatctgtaggcttcttgttgtactgtaacttctggttttgttagatggttgcatcgtgctttaacgtcaatggtacaaattttatcctcgctttgtgtatcatattcgtccctactataaaattgtatattcagattatcatgcgatgtgtatacgctaacggtatcaataaacggagcacaccatttagtcataaccgtaatccaaaaatttttaaagtatatcttaacgaaagaagttgtgtcattgtctacggtgtatggtactagatcctcataagtgtatatatctagagtaatgtttaatttattaaatggttgataatatggatcctcgtgacaatttccgaagatggaaataagacataaacacgcaataaatctaattgcggacatggttactccttaaaaaaatacgaataatcaccttggctatttagtaagtgtcatttaacactatactcatattaatccatggactcataatctctatacgggattaacggatgttctatatacggggatgagtagttctcttctttaactttatactttttactaatcatatttagactgatgtatgggtaatagtgtttgaagagctcgttctcatcatcagaataaatcaatatctctgtttttttgttatacagatgtattacagcctcatatattacgtaatagaacgtgtcatctaccttattaactttcaccgcatagttgtttgcaaatacggttaatcctttgacctcgtcgatttccgaccaatctgggcgtataatgaatctaaactttaattgcttgtaatcattcgaaataatttttagtttgcatccgtagttatcccctttatgtaactgtaaatttctcaacgcgatatctccattaataatgatgtcgaattcgtgctgtatacccatactgaatggatgaacgaataccgacggcgttaatagtaatttactttttcatctttacatattgggtactagttttactatcataagtttataaattccacaagctactatggaataagccaaccatcttagtataccacacatgtcttaaagtttattaattaattacatgttgttttatatatatcgctacgaatttaaagagaaattagtttaggaagaaaaattatctatctacatcatcacgtctctgtattctacgatagagtgctactttaagatgcgacagatccgtgtcatcaaatatatactccattaaaatgattattccggcagcgaacttgatattggatatatcacaacctttgttaatatctacgacaatagacagcagtcccatggttccataaacagtgagtttatctttctttgaagagatattttgtagagatcttataaaactgtcgaatgacatcgcatttatatctttagctaaatcgtatatgttaccatcgtaatatctaaccgcgtctatcttaaacgtttccatcgctttaaagacgtttccgatagatggtctcatttcatcagtcatactgagccaacaaatataatcgtgtataacatctttgatagaatcagactctaaagaaaacgaatcggctttattatacgcattcatgataaacttaatgaaaaatgtttttcgttgtttaagttggatgaatagtatgtcttaataattgttattatttcattaattaatatttagtaacgagtacactctataaaaacgagaatgacataactaatcataactagttatcaaagtgtctaggacgcgtaattttcatatggtatagatcctgtaagcattgtctgtattctggagctattttctctatcgcattagtgagttcagaatatgttataaatttaaatcgaataacgaacataactttagtaaagtcgtctatattaactcttttattttctagccatcgtaataccatgtttaagatagtatattctctagttactacgatctcatcgttgtctagaatatcacatactgaatctacatccaattttagaaattggtctgtgttacatatctcttctatattattgttgatgtattgtcgtagaaaactattacgtagaccattttctttataaaacgaatatatagtactccaattatctttaccgatatatttgcacacataatccattctctcaatcactacatctttaagattttcgttgttaagatatttggctaaactatataattctattagatcatcaacagaatcagtatatatttttctagatccaaagacgaactctttggcgtcctctataatattcccagaaaagatattttcgtgttttagtttatcgagatctgatctgttcatatacgccatgattgtacggtacgttatgataaccgcataaaataaaaatccattttcatttttaaccaatactattcataattgagattgatgtaatactttgttactttgaacgtaaagacagtacacggatccgtatctccaacaagcacgtagtaatcaaatttggtgttgttaaacttcgcaatattcatcaatttagatagaaacttatactcatcatctgttttaggaatccatgtattattaccactttccaacttatcattatcccaggctatgtttcgtccatcatcgttgcgcagagtgaataattcttttgtattcggtagttcaaatatatgatccatgcatagatcggcaaagctattgtagatgtgatttttcctaaatctaatataaaactcgtttactagcaaacactttcctgatttatcgaccaagacacatatggtttctaaatctatcaagtggtggggatccatagttatgacgcagtaacatatattattacattcttgactgtcgctaatatctaaatatttattgttatcgtattggattctgcatatagatggcttgtatgtcaaagatatagaacacataaccaatttatagtcgcgctttacattctcgaatctaaagttaagagatttagaaaacattatatcctcggatgatgttatcactgtttctggagtaggatatattaaagtctttacagatttcgtccgattcaaataaatcactaaataatatcccacattatcatctgttagagtagtatcattaaatctattatattttatgaaagatatatcactgctcacctctatatttcgtacatttttaaactgtttgtataatatctctctgatacaatcagatatatctattgtgtcggtagacgataccgttacatttgaattaatggtgttccattttacaacttttaacaagttgaccaattcatttctaatagtatcaaactctccatgattaaatattttaatagtatccattttatatcactacggacacaaagtagctgacataaaccattgtataatttttatgttttatgtttattagcgtacacattttggaagttccggcttccatgtatttcctggagagcaagtagatgatgaggaaccagatagtttatatccgtacttgcacttaaagtctacattgtcgttgtatgagtatgatcttttaaacccgctagacaagtatccgtttgatattgtaggatgtggacatttaacaatctgacacgtgggtggatcggaccattctcctcctgaacacaggacactagagttaccaatcaacgaatatccactattgcaactataagttacaacgctcccatcggtataaaaatcctcgtatccgttatgtcttccgttggatatagatggaggggattggcatttaacagattcacaaataggtgcctcgggattccataccatagatccagtagatcctaattcacaatacgatttagattcaccgatcaactgatatccgctattacaagagtacgttatactagagccaaagtctactccaccaatatcaagttggccattatcgatatctcgaggcgatgggcatctccgtttaatacattgattaaagagtgtccatccagtacctgtacatttagcatatataggtcccattttttgctttctgtatccaggtagacatagatattctatagtgtctcctatgttgtaattagcattagcatcagtctccacactattcttaaatttcatattaatgggtcgtgacggaatagtacagcatgatagaacgcatcctattcccaacaatgtcaggaacgtcacgctctccaccttcatatttatttatccgtaaaaatgttatcctggacatcgtacaaataataaaaagcccatatatgttcgctattgtagaaattgtttttcacagttgctcaaaaacgatggcagtgacttatgagttacgttacactttggagtctcatctttagtaaacatatcataatattcgatattacgagttgacatatcgaacaaattccaagtatttgattttggataatattcgtattttgcatctgctataattaagatataatcaccgcaagaacacacgaacatctttcctacatggttaaagtacatgtacaattctatccatttgtcttccttaactatatatttgtatagataattacgagtctcgtgagtaattccagtaattacatagatgtcgccgtcgtactctacagcataaactatactatgatgtctaggcatgggagacttttttatccaacgatttttagtgaaacattccacatcgtttaatactacatatttctcatacgtggtataaactccacccattacatatatatcatcgtttacgaataccgacgcgcctgaatatctaggagtaattaagtttggaagtcttatccatttcgaagtgccgtgtttcaaatattctgccacacccgttgaaatagaaaattctaatcctcctattacatataactttccatcgttaacacaagtactaacttctgattttaacgacgacatattagtaaccgttttccattttttcgttttaagatctacccgcgatacggaataaacatgtctattgttaatcatgccgccaataatgtatagacaattatgtaaaacatttgcattatagaattgtctatctgtattaccgactatcgtccaatattctgttctaggagagtaatgggttattgtggatatataatcagagtttttaatgactactatattatgttttataccatttcgtgtcactggctttgtagatttggatatagttaatcccaacaatgatatagcattgcgcatagtattagtcataaacttgggatgtaaaatgttgatgatatctacatcgtttggatttttatgtatccactttaataatatcatagctgtaacatcctcatgatttacgttaacgtcttcgtgggataagatagttgtcagttcatcctttgataattttccaaattctggatcggatgtcaccgcagtaatattgttgattatttctgacatcgacgcattatatagttttttaattccatatcttttagaaaagttaaacatccttatacaatttgtgaaattaatattatgaatcatagtttttacacatagatctactacaggcggaacatcaattattatggcagcaactagtatcatttctacattgtttatggtgatgtttatcttcttccagcgcatatagtctaatagcgattcaaacgcgtgatagtttataccattcaatataatcgcttcatcctttagatggtgatcctgaatgcgtttaaaaaaattatacggagacgccgtaataatttccttattcacttgtataatttccccattgatagaaaatattacgctttccattcttaaagtactataagtaattatagtataatgtaaacgtttatatattcaatatttttataaaaatcattttgacattaattcctttttaaatttccgtctatcatctatagaaacgtattctatgaatttataaaatgcttttacgtgtcctatcgtaggcgatagaaccgctaaaaagcctatcgaatttctacaaaagaatctgttatatggtatagggagagtataaaacattaaatgtccgtacttattaaagtattcagtagccaatcctaactctttcgaatacttattaatggctcttgttctgtacgaatctatttttttgaacaacggacctagtggtatatcttgttctatgtatctaaaataatgtctgactagatccgttagtttaatatccgcagtcatcttgtctagaatggcaaatctaactgcgggtttaggctttagtttagtttctatatctacatctatgtctttatctaacaccaaaaatataatagctaatattttattacaatcatccggatattcttctacgatctcactaactaatgtttctttggttatactagtatagtcactatcggacaaataaagaaaatcagatgatcgatgaataatacatttaaattcatcatctgtaagatttttgagatgtctcattagaatattattagggttagtactcattatcattcggcagctattacttattttattatttttcaccatatagatcaatcattagatcatcaaaatatgtttcaatcatcctaaagagtatggtgaatgactcttcccatctaatttctgaacgttcaccaatgtctctagccactttggcactaatagcgatcattcgcttagcgtcttctatattattaactggttgatttaatctatctagcaatggaccgtcggacagcgtcattctcatgttcttaatcaatgtacatacatcgccgtcatctaccaattcatccaacaacataagctttttaaaatcatcattataataggtttgatcgttgtcatttctccaaagaatatatctaataagtagagtcctcatgcttagttaacaactattttttatgttaaatcaattagtacaccgctatgtttaatacttattcatattttagtttttaggattgagaatcaatacaaaaattaatgcatcattaattttagaaatacttagtttccacgtagtcaatgaaacatttgaactcatcgtacaggacgttctcgtacaggacgtaactataaaccggtttatatttgttcaagatagatacaaatccgataactttttttacgaattctacgggatccactttaaaagtgtcataccgggttctttttatttttttaaacagatcaatggtgtgatgttgattaggtcttttacgaatttgatatagaatagcgtttacatattctccataatggtcaatcgccatttgttcgtatgtcataaattctttaattatatgacactgtgtattatttagttcatccttgttcattgttaggaatctatccaaaatggcaattatactagaactataggtgcgttgtatacacatattgatgtgtctgtttatacaatccatgatatttggatccatgctactaccttcgggtaaaattgtagcatcatataccatttctagtactttaggttcattattatccattgcagaggacgtcatgatcgaatcataaaaaaatatattatttttatgttattttgttaaaaataatcatcgaatacttcgtaagatactccttcatgaacataatcagttacaaaacgtttatatgaagtaaagtatctacgatttttacaaaagtccggatgcataagtacaaagtacgcgataaacggaataataatagatttatctagtctatctttttctatagctttcatagttagatacatggtctcagaagtaggattatgtaacatcagcttcgataaaatgactgggttatttagtcttacacattcgctcatacatgtatgaccgttaactacagagtctacactaaaatgattgaacaatagatagtctaccattgtttcgtattcagatagtacagcgtagtacatggcatcttcacaaattatatcattgtctaatagatatttgacgcatcttatggatcccacttcaacagccatcttaaaatcatattgctttcctttatcattaataatttctagaacatcatctctatcataaaagatacaaatattaactgtttgatccgtaataacattgctagtcaatagcaatttgttaataagatgcgctgggctcaatgtcttaataagaagtgtaagaggactatctccgaatttgttttgtttattaacatccgttgatggaagtaaaagatctataatgtctacattcttgactgttttagagcatacaatatggagaggtgtatttccatcatgatctggttttgagggactaattcctagtttcatcatccatgagattgtagaagcttttggattgtctgacataagatgtctatgaatatgatttttgccaaatttatccactatcctggcttcgaatccgatggacattatttttttaaacactctttctgaaggatctgtacacgccaacaacggaccacatccttcttcatcaaccgagttgttaatcttggctccatactgtaccaataaatttattctctctatgacttcatcatctgttcccgagagataatatagaggtgttttatgctgtttatcacacgcgtttggatctgcgccgtgcgtcagcagcatcgcgactattctattattattaattttagaagctatatgcaatggataatttccatcatcatccgtctcatttggagagtatcctctatgaagaagttcttcgacaaatcgttcatctagtcctttaattccacaatacgcatgtagaatgtgataattatttccagaaggttcgatagcttgtagcatattcctaaatacatctaaatttttactattatatttggcataaagagatagataatactcggccgacataatgttgtccattgtagtataaaaattaatatttctatttctatttctgtatatttgcaacaatttactctctataacaaatatcataacttagtttttttatgtcaagaaggcactggtttagttcatctataaatgtcacgccataactaccacgcatgccatactcagaattatgataaagatatttatccttggggtgtaggtaatggggattaatctttgttggatcagtctctaagttaacacatgtcacacatgatccatttatagttatatcacacgatgatgatttatgaattgattccggaagatcgctatcgtattttgtggttccacaattcatttccatacatgttattgtcacactaatattatgatgaactttatctagccgctgagtggtaaacaacagaacagatagtttattatctttaccaacaccctcagccgctgccacaaatctctgatccgtatccatgatggtcatgtttatttctagtccgtatccagtcaacactatgttagcatttctgtcgatatagctttcactcatatgacactcaccaataatagtagaattaatgtcgtaatttacaccaatagtgagttcggcggcaaagtaccaataccggtaatcttgtcgaggaggacatatagtattcttgtattctaccgaatacccgagagatgcgatacaaaagagcaagactaatttgtaaaccatcttactcaaaatatgtaacaatagtacgatgcaatgagtaagacaataggaaatctatcttatatacacataattattctatcaattttaccaattagttagtgtaatgttaacaaaaatgtgggagaatctaattagtttttctttacacaattgacgtacatgagtctgagttccttgtttttgctaattatttcatccaatttattattcttgacgatatcgagatcttttgtataggagtcaaacttgtattcaacatgcttttctataatcattttagctatttcggcatcatccaatagtacattttccagattagcagaatagatattaatgtcgtatttgaacagagcctgtaacatctcaatgtctttattatctatagccaatttaatgtccggaatgaagagaagggaattattggtgtttgtcgacgtcatatagtcgagcaagagaatcatcatatccacgtgtccattttttatagtgatgtgaatacaactaaggagaatagccagatcaaaagtagatggtatctctgaaagaaagtaggaaacaatacttacatcattaagcatgacggcatgataaaatgaagttttccatccagttttcccatagaacatcagtctccaatttttcttaacaaacagttttaccgtttgcatgttaccactatcaaccgcataatacaatgcggtgtttcccttgtcatcaaattgtgaatcatccagtccactgaatagcaaaatctttactattttggtatcttccaatgtggctgcctgatgtaatggaaattcattctctagaagatttttcaatgctccagcgttcaacaacgtacatactagacgcacgttattatcagctattgcataatacaaggcactatgtccatggacatccgccttaaatgtatctttactagagagaaagcttttcagctgcttagacttccaagtattaattcgtgacagatccatgtctgaaacgagacgctaattagtgtatattttttcattttttataattttgtcatattgcaccagaattaataatatctttaatagatctgattagtagatacatggctatcgcaaaacaacatatacacatttaataaaaataatatttattaagaaaattcagatttcacgtacccatcaatataaataaaataatgattccttacaccgtacccatattaaggagattccaccttacccataaacaatataaatccagtaatatcatgtctgatgatgaacacaaatggtgtattaaattccagtttttcaggagatgatctcgccgtagctaccataatagtagatgcctctgctacagttccttgttcgtcgacatctatctttgcattctgaaacattttataaatatataatgggtccctagtcatatgtttaaacgacgcattatctggattaaacatactaggagccatcatttcggctatcgacttaatatccctcttattttcgatagaaaatttagggagtttaagattgtacactttattccctaattgagacgaccaatagtctaattttgcagccgtgatagaatctgtgaaatgggtcatattatcacctattgccaggtacatactaatattagcatccttatacggaaggcgtaccatgtcatattctttgtcatcgattgtgattgtatttccttgcaatttagtaactacgttcatcatgggaaccgttttcgtaccgtacttattagtaaaactagcattgcgtgttttagtgatatcaaacggatattgccatatacctttaaaatatatagtattaatgattgcccatagagtattattgtcgagcatattagaatctactacattagacataccggatctacgttctactatagaattaattttattaaccgcatctcgtctaaagtttaatctatataggccgaatctatgatattgttgataatacgacggtttaatgcacacagtattatctacgaaactttgataagttagatcagtgtacgtatatttagatgttttcagcttagctaatcctgatattaattctgtaaatgctggacccagatctctttttctcaaatccatagtcttcaataattctattctagtattacctgatgcaggcaatagcgacataaacatagaaaacgaataaccaaacggtgagaagacaatattatcatcttgaatatttttatacgctactataccggcattggtaaatccttgtagacgataggcggacgctgaacacgctaacgatagtatcaataacgcaatcatgattttatggtattaataattaaccttatttttatgttcggtataaaaaaattattgatgtctacacatccttttgtaattgacatctatatatccttttgtataatcaactctaatcactttaacttttacagttttccctaccagtttatccctatattcaacatatctatccatatgcatcttaacactctctgccaagatagcttcagagtgaggatagtcaaaaagataaatatatagagcataatcattctcgtatactctgccctttattacatcacccgcattgggcaacgaataacaaaatgcaagcatcttgttaacgggctcgtaaattgggataaaaattatgtttttattgtcttatatctattttattcaagagaatattcaggaatttctttttccggttgtatctcgtcgcagtatatatcatttgtacattgtttcatattttttaatagtttacaccttttagtaggactagtatcgtacaattcatagctgtattttgaattccaatcacgcataaaaatatcttccaattgttgacgaagacctaatccatcatccggtgtaatattaatagatgctccacatgtatccgtaaagtaatttcctgtccaatttgaggtacctatataggccgttttatcggttaccatatatttggcatggtttaccctagaatacggaatgggaggatcagcatctggtacaataaatagctttacttctatatttatgtttttagattttagcatagcgatagatcttaaaaagtttctcatgataaacgaagatcgttgccagcaactaatcaatagcttaacggatacttgtctgtctatagcggatcttcttaattcatcttctatataaggccaaaacaaaattttacccgccttcgaataaataatagggataaagttcataacagatacataaacgaatttactcgcatttctaatacatgacaataaagcggttaaatcattggttctttccatagtacatagttgttgcggtgcagaagcaataaatacagagtgtggaacgccgcttacgttaatactaagaggatgatctgtattataatacgacggataaaagtttttccaattatatggtagattgttaactccaagataccagtatacctcaaaaatttgagtgagatccgctgccaagttcctattattgaagatcgcaatacccaattccttgacctgagttagtgatctccaatccatgttagcgcttcctaaataaatatgtgtattatcagatatccaaaattttgtatgaagaactcctcctaggatatttgtaatatctatgtatcgtacttcaactccggccatttgtagtctttcaacatcctttaatggtttgttagatttattaacggctactctaactcgtactcctcttttgggtaattgtacaatctcgtttaatattatcgtgccgaaattcgtacccacttcatccgataaactccaataaaaagatgatatatctagtgtttttgtggtattggatagaatttccctccacatgttaaatgtagacaaatatactttatcaaattgcatacctataggaatagtttctgtaatcactgcgattgtattatccggattcattttatttgttaaaagaataatcctatatcacttcactctattaaaaatccaagtttctatttctttcatgactgattttttaacttcatccgtttccttatgaagatgatgtttggcaccttcataaatttttatttctctattacaatttgcatgttgcatgaaataatatgcacctaaaacatcgctaatcttattgtttgttccctggagtatgagagtcggggggtgttaatcttggaaattatttttctaaccttgttggtagccttcaagacctgactagcaaatccagccttaattttttcatgattgactaatgggtcgtattggtatttataaactttatccatatctctagatactgattctggacatagctttccgactggcgcatttggtgtgatggttcccataagtttggcagctagcagattcagtcttgaaacagcatctgcattaactagaggagacattagaatcattgctgtaaacaagtttggattatcgtaagaggctagctcccatggaatgacccaataagtagatttaatagttaccacgtgctgtaccaaagtcatcaatcatcattttttcaccattacttcttccatgtccaatatgatcatgtgagaatactaaaattcctaacgatgatatgttttcagctagttcgtcataacgtccagaatgtttaccagctccatgacttatgaatactaatgccttaggatatgtaataggtttccaatatttacaatatatgtaatcattgtccagattgaacatacagtttgcactcatgattcacgttatataactatcaatattaacagttcgtttgatgatcatattatttttatgttttattgataattgtaaaaacatacaattaaatcaatatagaggaaggagacggctactgtcttttgtaagatagtcatggcgactaaattagattatgaggatgctgttttttactttgtggatgatgataaaatatgtagtcgcgactccatcatcgatctaatagatgaatatattacgtggagaaatcatgttatagtgtttaacaaagatattaccagttgtggaagactgtacaaggaattgatgaagttcgatgatgtcgctatacggtactatggtattgataaaattaatgagattgtcgaagctatgagcgaaggagaccactacatcaattttacaaaagtccatgatcaggaaagtttattcgctaccataggaatatgtgctaaaatcactgaacattggggatacaaaaagatttcagaatctagattccaatcattgggaaacattacagatttgatgaccgacgataatataaacatcttgatactttttctagaaaaaaaattgaattgatgatataggggtcttcataacgcataattattacgttagcattctatatccgtgttaaaaaaaattatcctatcatgtatttgagagttttatatgtagcaaacatgatagctgtgatgccaataagctttagatattcacgcgtgctagtgttagggatggtattatctggtggtgaaatgtccgttatataatctacaaaacaatcatcgcatatagtatgcgatagtagagtaaacatttttatagtttttactggattcatacatcgtctacccaattcggttataaatgaaattgtcgccaatcttacacccaaccccttgttatccattagcatagtattaacttcgttatttatgtcataaactgtaaatgattttgtagatgccatatcatacatgatattcatgtccctattataatcattactaactttatcacaatatatgttgataatatctatatatgatctagtctttgtgggcaactgtctatacaagtcgtctaaacgttgtttactcatatagtatcgaacagccatcattacatggtcccgttccgttgatagataatcgagtatgttagtggacttgtcaaatctatataccatattttctggaagtggatatacatagtcgtgatcaacattattgctagcctcatcttctatatcctgtactataccattatctatatcatctacataatctatgatattattacacataaacatcgacaacatactattgtttattatctaagtcctgttgatccaaacccttgatctcctctatttgtactatctagagattgtacttcttccagttctggataatatatacgttgatagattagctgagctattctatctccagtatttacattaaacgtacattttccattattaataagaatgactcctatgtttcccctataatcttcgtctattacaccacctcctatatcaatgccttttagtgacagaccagacctaggagctattctaccatagcagaacttaggcatggacatactaatatctgtcttaattaactgtctttctcctggagggatagtataatcgtaagcgctatacaaatcatatccggcagcacccggcgattgcctagtaggagatttagctctgttagtttccttaacaaatctaactggtgagttaatattcatgttgaacataaaactaatattttatttcaaaattatttaccatcccatatattccatgaataagtgtgatgattgtacacttctatagtatctatatacgatccacgataaaatcctcctatcaatagcagtttattatccactatgatcaattctggattatccctcggataaataggatcatctatcagagtccatgtattgctggattcacaataaaattccgcatttctaccaaccaagaataaccttctaccgaacactaacgcgcatgatttataatgaggataataagtggatggtccaaactgccactgatcatgattgggtagcaaatattctgtagttgtatcagtttcagaatgtcctcccattacgtatataacattgtttatggatgccactgctggattacatctaggtttcagaagactcggcatattaacccaagcagcatccccgtggaaccaacgctcaacagatgtgggatttggtagacctcctactacgtataatttattgttagcgggtatcccgctagcatacagtctggggctattcatcggaggaattggaatccaattgtttgatatataatttacagctatagcattgttatgtatttcattgttcatccatccaccgatgagatatactacttctccaacatgagtacttgtacacatatggaatatatctataatttgatccatgttcataggatactctatgaatggatacttgtatgatttgcgtggttgtttatcacaatgaaatattttggtacagtctagtatccattttacattatttatacctctgggagaaagataatttgacctgattacatttttgataaggagtagcagatttcctaatttatttcttcgcctcatataccacttaatgacaaaatcaactacataatcctcatctggaacatttagttcatcgctttctagaataagtttcatagatagataatcaaaattgtctatgatgtcatcttccagttccaaaaagtgtttggcaataaagtttttagtatgacataagagattggatagtccgtattctatacccatcatgtaacactcgacacaatattcctttctaaaatctcgtaagataaagtttatacaagtgtagatgataaattctacagaggttaatatagaagcacgtaataaattgacgacgttatgactatctatatatacctttccagtatatgagtaaataactatagaagttaaactgtgaatgtcaaggtctagacaaacccttgtaactggatctttatttttcgtgtatttttgacgtaaatgtgtgcgaaagtaaggagataactttttcaatatcgtagaattgactattatattgcctcctatggcatcaataattgttttgaatttcttagtcatagacaatgctaatatattcttacagtacacagtattgacaaatatcggcatttatgtttctttaaaagtcaacatctagagaaaaatgattatctttttgagacataactcccattttttggtattcacccacacgtttttcgaaaaaattagtttttccttccaatgatatattttccatgaaatcaaacggattggtaacattataaatttttttaaatcccaattcagaaatcaatctatccgcgacgaattctatatatgttttcatcatttcacaattcattcctataagtttaactggaagagccgcagtaagaaattcttgttcaatggatactgcatctgttataatagatctaacggtttcttcactcggtggatgcaataaatgtttaaacatcaaacatgcgaaatcgcagtgcagaccctcgtctctactaattagttcgttggaaaacgtgagtccgggcattaggccacgctttttaagccaaaatatggaagcgaatgatccagaaaagaaaattccttctactgcagcaaaggcaataagtctctctccataaccggcgctgtcatgtatccacttttgagcccaatcggccttcttttttacacaaggcatcgtttctatggcattaaagagatagtttttttcattactatctttaacataagtatcgatcaaaagactatacatttccgaatgaatgttttcaatggccatctgaaatccgtagaaacatctagcctcggtaatctgtacttctgtacaaaatcgttccgccaaattttcattcactattccgtcactggctgcaaaaaacgccaatacatgttttataaaatatttttcgtctggtgttagtttattccaatcattgatatctttagatatatctacttcttccactgtccaaaatgatgcctctgcctttttatacatgttccagatgtcatgatattggattgggaaaataacaaatctatttggatttggtgcaaggatgggttccataactaaattaacaataacaataaattttttttcagttatctatatgcctgtacttggattttttgtacatcgatatcgccgcaatcactacaataattacaagtattattgatagcattgttattagtactatcataattaaattatctacattcatgggtgctgaataatcgttattatcatcattatcattttgtaattgtgacatcatactagataaatcgtttgcgagattgttgtgggaagcgggcatggaggatgcattatcattattatttaacgccttccatttggattcacaaatgttacgcacattcaacattttatggaaactataattttgtgaaaacaaataacaagaaaactcgtcatcgttcaaatttttaacgatagtaaaccgattaaacgtcgagctaatttctaacgctagcgactctgttggatatgggtttccagatatatatcttttcagttcccctacgtatctataatcatctgtaggaaatggaagatatttccatttatctactgttcctaatatcatatgtggtggtgtagtagaaccattaagcgcgaaagatgttatttcgcatcgtattttaacttcgcaataatttctggttagataacgcactctaccagtcaagtcaatgatattagcctttacagatatattcatagtagtcgtaacgatgactccatcttttagatgcgatactcctttgtatgtaccagaatcttcgtacctcaaactcgatatatttaaacaagttaatgagatattaacgcgttttatgaatgatgatatataaccagaagttttatcctcggtggctagcgctataaccttatcattataataccaactagtgtgattaatatgtgacacgtcagtgtgggtacaaatatgtacattatcgtctacgtcgtattcgatacatccgcatacagccaacaaatataaaatgacaaatactctaacgccgttcgtacccatcttgatgcggtttaataaatgttttgatttcaatttattgtaaaaaaagattcggttttatactgttcgatattctcattgcttatattttcatctatcatctccacacagtcaaatccgtggttagcatgcacctcatcaaccggtaaaagactatcggactcttctatcattataactctagaatatttaatttggtcattattaatcaagtcaattatcttatttttaacaaacgtgagtattttactcattttttataaaaacttttagaaatatacagactctatcgtgtgtctatatcttctttttatatccaatgtatttatgtctgatttttcttcatttatcatatataatggtccaaattctacacgtgcttcggattcatccagatcattaaggttcttataattgtaacatccttctcttccctcttctacatcttccttcttattcttattcttagcgtcacagaatctaccacagcaggatcccatgacgagcgtcatattaaactaatccattttcaattataatatatgattagtaatgaccattaaaataaaaaatattcttcataaccggcaagaaagtgaaaagttcacattgaaactatgtcagtagtatacatcatgaaatgatgatatatatatactctattttggtggaggattatatgatataattcgtggataatcatttttaagacacatttctttattcgtaaatcttttcacgttaaatgagtgtccatattttgcaatttcttcatatgatggcggtgtacgtggacgaggctgctcctgttcttgttgtggtcgccgactgtcgtgtctgcgtttagatccctccattatcgcgattgcgtagatggagtactattttataccttgtaattaaatttttttattaattaaacgtataaaaacgttccgtatctgtatttaagagccagatttcgtctaatagaacaaatagctacagtaaaaataactagaataattgctacacccactagaaaccacggatcgtaatacggcaatcggttttcgataataggtggaacgtatattttatttaaggacttaacaattgtctgtaaaccacaatttgcttccgcggatcctgtattaactatctgtaaaagcatatgttgaccgggcggagccgaacattctccgatatctaatttctgtatatctataatattattaacctccgcatacgcattacagttcttttctagcttggataccgcactaggtacatcgtctagatctattcctatttcctcagcgatagctcttctatccttttccggaagcaatgaaatcacttcaataaatgattcaaccatgagtgtgaaactaagtcgagaattactcatgcatttgttagttattcggagcgcgcaatttttaaactgtcctataacctctcctatatgaatagcacaagtgacattagtagggatagaatgttgagctaatttttgtaaataactatctataaaaagattatacaaagttttaaactctttagtttccgccatttatccagtctgagaaaatgtctctcataataaatttttccaagaaactaattgggtgaagaatggaaacctttaatctatatttatcacagtctgttttggtacacatgatgaattcttccaatgccgtactaaattcgatatctttttcgatttctggatatgtttttaataaagtatgaacaaagaaatggaaatcgtaataccagttatgtttaactttgaaattgttttttattttcttgttaatgattccagccacttgggaaaagtcaaagtcgtttaatgccgatttaatacgttcattaaaaacaaactttttatcctttagatgaattattattggttcattggaatcaaaaagtaagatattatcgggtttaagatctgcgtgtaaaaagttgtcgcaacagggtagttcgtagattttaatgtataacagagccatctgtaaaaagataaactttatgtattgtaccaaagatttaaatcctaatttgatagctaactcggtatctactttatctgccgaatacagtgctaggggaaaaattataatgtttcctctttcatattcgtagttagttctcttttcatgttcgaaaaagtgaaacatgcggttaaaatagtttataacattaatattactgttaataactgccggataaaagtgggatagtaatttcacgaatttgatactgtcctttctctcgttaaacgcctttaaaaaaactttagaagaatatctcaatgagagttcctgaccatccatagtttgtatcaataatagcaacatatgaagaacacgtttatacagagtatgtaaaaatgttaatttatagtttaatcccatggcccacgcacacacgattaattttttttcatctccctttagattgttgtatagaaatttgggtactgtgaactccgccgtagtttccatgggactatataattttgtggcctcgaatacaaattttactacatagttatctatcttaaagactataccatatcctcctgtagatatgtgataaaaatcgtcgtttataggataaaatcgtttatccttttgttggaaaaaggatgaattaatgtaatcattctcttctatctttagtagtgtttccttattaaaattcttaaaataatttaacaatctaactgacggagcccaattttggtgtaaatctaattgggacattatattgttaaaatacaaacagtctcctaatataacagtatctgataatctatggggagacatccattgatattcaggggatgaatcattggcaacacccatttattgtacaaaaagccccaatttacaaacgaaagtccaggtttgatagagacaaacaattaactattttgtctctgtttttaacacctccacagtttttaatttctttagtaatgaaattattcacaatatcagtatcttctttatctaccagagattttactaacttgataaccttggctgtctcattcaatagggtagtaatatttgtatgtgtgatattgatatctttttgaattgtttcttttagaagtgattctttgatggtgccagcatacgaattacaataatgcagaaactcggttaacatgcaggaattatagtaagccaattccaattgttgcctgtgttgtattagagtgtcaatatgagcaatggtgtccttgcgtttctctgatagaatgcgagcagcgattttggcgttatcatttgacgatatttctggaatgacgaatcctgtttctactaactttttggtaggacaaagtgaaacaatcaagaagatagcttctcctcctatttgtggaagaaattgaactcctctagatgatctactgacgatagtatctccttgacagatattggaccgaattacagaagtacctggaatgtaaagccctgaaaccccctcattttttaagcagattgttgccgtaaatcctgcactatgcccaagatagagagctcctttggtgaatccatctctatgtttcagtttaaccaagaaacagtcagctggtctaaaatttccatctctatctaatacagcatctaacttgatgtcaggaactatgaccggtttaatgttatatgtaacattgagtaaatccttaagttcataatcatcactgtcatcagttatgtacgatccaaacaatgtttctaccggcatagtggatacgaagatgctatccatcagaatgtttccctgattagtattttctatatagctattcttctttaaacgattttccaaatcagtaactatgttcatttttttaggagtaggacgcctagccagtatggaagaggattttctagatcctctcttcaacatctttgatctcgatggaatgcaaaaccccatagtgaaacaaccaacgataaaaataatattgtttttcactttttataattttaccatctgactcatggattcattaatatctttataagagctactaacgtataattctttataactgaactgagatatatacaccggatctatggtttccataattgagtaaatgaatgctcggcaataactaatggcaaatgtatagaacaacgaaattatactagagttgttaaagttaatattttctatgagctgttccaataaattatttgttgtgactgcgttcaagtcataaatcatcttgatactatccagtaaaccgtttttaagttctggaatattatcatcccattgtaaagcccctaattcgactatcgaatatcctgctctgatagcagtttcaatatcgacggacgtcaatactgtaataaaggtggtagtattgtcatcatcgtgataaactacgggaatatggtcgttagtaggtacggtaactttacacaacgcgatatataactttccttttgtaccatttttaacgtagttgggacgtcctgcagggtattgttttgaagaaatgatatcgagaacagatttgatacgatatttgttggattcctgattattcactataatataatctagacagatagatgattcgataaatagagaaggtatatcgttggtaggataatacatccccattccagtattctcggatactctattgatgacactagttaagaacatgtcttctattctagaaaacgaaaacatcctacatggactcattaaaacttctaacgctcctgattgtgtctcgaatgcctcgtacaaggatttcaaggatgccatagattctttgaccaacgatttagaattgcgtttagcatctgatttttttattaaatcgaatggtcggctctctggtttgctaccccaatgataacaatagtcttgtaaagataaaccgcaagaaaatttatacgcatccatccaaataaccctagcaccatcggatgatattaatgtattattatagattttccatccacaattattgggccagtatactgttagcaacggtatatcgaatagattactcatgtaacctactagaatgatagttcgtgtactagtcataatatctttaatccaatctaaaaaatttaaaattagattttttacactgttaaagttaacaaaagtattacccgggtacgtggatatcatatatggcattggtccattatcagtaatagctccataaactgatacggcgatggtttttatatgtgtttgatctaacgaggaagaaattcgcgcccacaattcatctctagatatgtatttaatatcaaacggtaacacatcaatttcgggacgcgtatatgtttctaaatttttaatccaaatataatgatgacctatatgccctattatcatactgtcaactatagtacacctagggaacttacgatacatctgtttcctataatcgttaaattttacaaatctataacatgctaaaccttttgacgacagccattcattaatttctgatatggaatctgtattctcgataccgtatcgttctaaagccagtgctatatctccctgttcgtgggaacgctttcgtataatatcgatcaacggataatctgaagtttttggagaataatatgactcatgatctatttcgtccataaacaatctagacataggaattggaggcgatgatcttaattttgtgcaatgagtcgtcaatcctataacttctaatcttgtaatattcatcatcgacataatactatctatgttatcatcgtatattagtataccatgaccttcttcatttcgtgccaaaatgatatacagtcttaaatagttacgcaatatctcaatagtttcataattgttagctgttttcatcaaggtttgtatcctgtttaacatgatggcgttctataacgtctctattttctatttttaattttttaaatttttaacgatttactgtggctagatacccaatctctctcaaatatttttttagcctcgcttacaagctgtttatctatactattaaaactgacgaatccgtgattttggtaatgggttccgtcgaaatttgccgaagtgatatgaacatattcgtcgtcgactatcaacaattttgtattattctgaatagtgaaaaccttcacagatagatcattttgaacacacaacgcatctagacttttggcggttgccatagaatatacgtcgttcttatcccaattaccaactagaagtctgatcttaactcctctattaatggctgcttctataatggagttgtaaatgtcgggccaatagtagctattaccgtcgacacgtgtagtgggaactatggccaaatgttcaatatctatactagtcttagctgacctgagtttatcaataactacatcggtatctagatctctagaatatcccaataggtgttccggagaatcagtaaagaacactccacctataggattcttaatatgatacgcagtgctaactggcaaacaacaagccgcagagcataaattcaaccatgaattttttgcgctattaaaggctttaaaagtatcaaatcttctacgaagatctgtggccagcgggggataatcagaatatacacctaacgttttaatcgtatgtatagatcctccagtaaatgacgcgtttcctacataacatctttcatcatctgacacccaaaaacaaccgagtagtagtcccacattattttttttatctatattaacggttataaaatttatatccgggcagtgactttgtagctctcccagatttcttttccctcgttcatctagcaaaactattattttaatccctttttcagatgcctcttttagtttatcaaaaataagcgctcccctagtcgtactcagaggattacaacaaaaagatgctatgtatatatatttcttagctagagtgataatttcgttaaaacattcaaatgttgttaaatgatcggatctaaaatccatattttctggtagtgtttctaccagcctacattttgctcccgcaggtaccgatgcaaatggccacatttagttaacataaaaacttatacatcctgttctatcaacgattctagaatatcatcggctatatcgctaaaattttcatcaaagtcgacatcacaacctaactcagtcaatatattaagaagttccatgatgtcatcttcgtctatttctatatccgtatccattgtagattgttgaccgattatcgagtttaaatcattactaatactcaatccttcagaatacaatctgtgtttcattgtaaatttataggcggtgtatttaagttggtagattttcaattatgtattaatatagcaacagtagttcttgctcctccttgattctagcatcctcttcattattttcttctacgtacataaacatgtccaatacgttagacaacacaccgacgatggcggccgcagatctcgagttatgatctacttccttaccgtgcaataaattagaatatattttctacttttacgagaaattaattattgtatttattatttatgggtgaaaaacttactataaaaagcgggtgggtttggaattagtgaaagcttaaaaattgaaattttattttttttttttggaatataaataagctcgaagtcgacagatctaggcctggtaccaggaggaggaattcagcttaaagatgacttcgaaagtttatgatccagaacaaaggaaacggatgataactggtccgcagtggtgggccagatgtaaacaaatgaatgttcttgattcatttattaattattatgattcagaaaaacatgcagaaaatgctgttatttttttacatggtaacgcggcctcttcttatttatggcgacatgttgtgccacatattgagccagtagcgcggtgtattataccagatcttattggtatgggcaaatcaggcaaatctggtaatggttcttataggttacttgatcattacaaatatcttactgcatggtttgaacttcttaatttaccaaagaagatcatttttgtcggccatgattggggtgcttgtttggcatttcattatagctatgagcatcaagataagatcaaagcaatagttcacgctgaaagtgtagtagatgtgattgaatcatgggatgaatggcctgatattgaagaagatattgcgttgatcaaatctgaagaaggagaaaaaatggttttggagaataacttcttcgtggaaaccatgttgccatcaaaaatcatgagaaagttagaaccagaagaatttgcagcatatcttgaaccattcaaagagaaaggtgaagttcgtcgtccaacattatcatggcctcgtgaaatcccgttagtaaaaggtggtaaacctgacgttgtacaaattgttaggaattataatgcttatctacgtgcaagtgatgatttaccaaaaatgtttattgaatcggatccaggattcttttccaatgctattgttgaaggcgccaagaagtttcctaatactgaatttgtcaaagtaaaaggtcttcatttttcgcaagaagatgcacctgatgaaatgggaaaatatatcaaatcgttcgttgagcgagttctcaaaaatgaacaagcggccgccgccaccatgagcaagggcgaggaactgttcactggcgtggtcccaattctcgtggaactggatggcgatgtgaatgggcacaaattttctgtcagcggagagggtgaaggtgatgccacatacggaaagctcaccctgaaattcatctgcaccactggaaagctccctgtgccatggccaacactggtcactaccttcacctatggcgtgcagtgcttttccagatacccagaccatatgaagcagcatgactttttcaagagcgccatgcccgagggctatgtgcaggagagaaccatctttttcaaagatgacgggaactacaagacccgcgctgaagtcaagttcgaaggtgacaccctggtgaatagaatcgagctgaagggcattgactttaaggaggatggaaacattctcggccacaagctggaatacaactataactcccacaatgtgtacatcatggccgacaagcaaaagaatggcatcaaggtcaacttcaagatcagacacaacattgaggatggatccgtgcagctggccgaccattatcaacagaacactccaatcggcgacggccctgtgctcctcccagacaaccattacctgtccacccagtctgccctgtctaaagatcccaacgaaaagagagaccacatggtcctgctggagtttgtgaccgctgctgggatcacacatggcatggacgagctgtacaagtgagcggccgccctgctagcaagcttgctagcggccgctcgagatctgcggccgctacagacacgaatatgactaaaccgatgaccatttaaaaacccctctctagctttcacttaaactgtatcgatcattcttttagcacatgtataatataaaaacattattctatttcgaatttaggcttccaaaaatttttcatccgtaaaccgataataatatatatagacttgttaatagtcggaataaatagattaatgcttaaactatcatcatctccacgattagagatacaatatttacattctttttgctgtttcgaaactttatcaatacacgttaatacaaacccaggaaggagatattgaaactgaggctgttgaaaatgaaacggtgaatacaataattcagataatgtaaaatcatgattccgtattctgatgatattagaactgctaatggatgtcgatggtatgtatctaggagtatctattttaacaaagcatcgatttgctaatatacaattatccttttgattaattgttattttattcatattcttaaaaggtttcatatttatcaattcttctacattaaaaatttccatttttaatttatgtagccccgcaatactcctcattacgtttcattttttgtctataatatccattttgttcatctcggtacatagattatccaattgagaagcgcatttagtagttttgtacattttaagtttattgacgaatcgtcgaaaactagttatagttaacattttattatttgataccctgatattaatacccctgccgttactattatttataactgatgtaatccacgtaacattggaattaactatcgatagtaatgcatcgacgcttccaaaattgtctattataaactcaccgataatttttttattgcatgttttcatattcattaggattatcaaatctttaatcttattacgattgtatgcgttgatattacaagacgtcattctaaaagacggaggatctccatcaaatgccagacaatcacgtacaaagtacatggaaataggttttgttctattgcgcatcatagatttatatagaacacccgtagaaatactaatttgttttactctataaaatactaatgcatctatttcatcgttttgtataacgtctttccaagtgtcaaattccaaatttttttcattgatagtaccaaattcttctatctctttaactacttgcatagataggtaattacagtgatgcctacatgccgttttttgaaactgaatagatgcgtctagaagcgatgctacgctagtcacaatcaccactttcatatttagaatatatatatgtaaaaatatagtagaatttcattttgtttttttctatgctataaatgaattctcattttgcatctgctcatactccgttttatattaataccaaagaaggaagatatctggttctaaaagccgttaaagtatgcgatgttagaactgtagaatgcgaaggaagtaaagcttcctgcgtactcaaagtagataaaccctcatcgcccgcgtgtgagagaagaccttcgtccccgtccagatgcgagagaatgaataaccctggaaaacaagttccgtttatgaggacggacatgctacaaaatatgttcgcggctaatcgcgataatgtagcttctagacttttgtcctaaaatactattatatccttttcgatattaataaatccgtgtcgtccaggttttttatctctttcagtatgtgaatagataggtattttatctctattcatcatcgaatttaagagatccgataaacattgtttgtattctccagatgtcagcatctgatacaacaatatatgtgcacataaacctctggcacttatttcatgtaccttccccttatcactaaggagaatagtatttgagaaatatgtatacatgatattatcatgaattagatatacagaatttgtaacactctcgaaatcacacgatgtgtcggcgttaagatctaatatatcactcgataacacattttcatctagatacactagacattttttaaagctaaaatagtctttagtagtaacagtaactatgcgattattttcatcgatgatacatttcatcggcatattattacgcttaccatcaaagactataccatgtgtatatctaacgtattctagcatggttgccatacgcgcattaaacttttcaggatctttggatagatcttccaatctatctatttgagaaaacatttttatcatgttcaatagttgaaacgtcggatccactatatagatattatctataaagattttaggaactacgttcatggtatcctggcgaatattaaaactatcaatgatatgattatcgttttcatcttttatcaccatatagtttctaagatatgggattttacttaatataatattatttcccgtgataaattttattagaaaggccaaatctataagaaaagtcctagaattagtctgaagaatatctatatcgccgtatagtatatttggattaattagatatagagaatatgatccgtaacatatacaacttttattatggcgtctaagatattcttccatcaacttattaacatttttgactagggaagatacattatgacgtcccattacttttgccttgtctattactgcgacgttcatagaatttagcatatctcttgccaattcttccattgatgttacattataagaaattttagatgaaattacatttggagctttaatagtaagaactcctaatatgtccgtgtatgtggtcactaatacagattgtagttctataatcgtaaataatttacctatattatatgtttgagtctgtttagaaaagtagctaagtatacgatcttttatttctgatgcagatgtattaacatcggaaaaaaatctttttttattcttttttactaaagatacaaatatgtctttgttaaaaacagttattttctgaatatttctagcttgtaattttaacatatgatattcgttcacactaggtactctgcctaaataggtttctataatctttaatgtaatattaggaaaagtattctgatcaggattcctattcattttgaggatttaaaactctgattattgtctaatatggtctctacgcaaactttttcacagagcgatagagtttttgataactcgtttttcttaagaaatataaaactactgtctccagagctcgctctatcttttattttatctaattcgatacaaactcctgatactggttcagaaagtaattcattaattttcagtcctttatagaagatatttaatatagataatacaaaatcttcagtttttgatatcgatctgattgatcctagaactagatatattaataacgtgctcattaggcagtttatggcagcttgataattagatatagtatattccagttcatatttattagataccgcattgcccagattttgatattctatgaattcctctgaaaataaatccaaaataactagacattctattttttgtggattagtgtactctcttccctctatcatgttcactactggtgtccacgatgataaatatctagagggaatataatatagtccataggatgccaatctagcaatgtcgaataactgtaattttattcttcgctcttcattatgaattgattcttgaggtataaacctaacacaaattatattattagacttttcgtatgtaatgtctttcatgttataagtttttaatcctggaatagaatctattttaatgaggcttttaaacgcagagttctccaacgagtcaaagcataatactctgttgtttttcttatatacgatgttacgattttcttctttgaatggaataggtttttgaattagtttataattacaacataatagataaggaagtgtgcaaatagtacgcggaaaaaacataatagctcccctgttttcatccatggttttaagtaaatgatcactggcttctttagtcaatggatattcgaacattaaccgtttcatcatcattggacagaatccatatttcttaatgtaaagagtgatcaaatcattgtgtttattgtaccatcttgttgtaaatgtgtattcggttatcggatctgctcctttttctattaaagtatcgatgtcaatctcgtctaagaattcaactatatcgacatatttcatttgtatacacataaccattactaacgtagaatgtataggaagagatgtaacgggaacagggtttgttgattcgcaaactattctaatacataattcttctgttaatacgtcttgcacgtaatctattatagatgccaagatatctatataattattttgtaagatgatgttaactatgtgatctatataagtagtgtaataattcatgtattttgatatatgttccaactctgtctttgtgatgtctagtttcgtaatatctatagcatcctcaaaaaatatattcgcatatattcccaagtcttcagttctatcttctaaaaaatcttcaacgtatggaatataataatctattttacctcttctgatatcattaatgatatagtttttgacactatcttctgtcaattgattcttattcactatatctaagaaacggatagcgtccctaggacgaactactgccattaatatctctattatagcttctggacataattcatctattataccagaattaatgggaactattccgtatctatctaacatagttttaagaaagtcagaatctaagacttgatgttcatatattggttcatacatgaaatgatctctattgatgatagtgactatttcattctctgaaaattggtaactcattctatatatgctttccttgttgatgaaggatagaatatactcaatagaatttgtaccaacaaactgttctcttatgaatcgtatatcatcatctgaaataatcatgtaaggcatacatttaacaattagagacttgtctcctgttatcaatatactattcttgtgataatttatgtgtgaggcaaatttgtccacgttctttaattttgttatagtagatatcaaatccaatggagctacagttcttggcttaaacagatatagtttttctggaacaaattctacaacattattataaaggactttgggtagataagtgggatgaaatcctattttaattaatgcgatagccttgtcctcgtgcagatatccaaacgcttttgtgatagtatggcattcattgtctagaaacgctctacgaatatctgtgacagatatcatctttagagaatatactagtcgcgttaatagtactacaatttgtattttttaatctatctcaataaaaaaattaatatgtatgattcaatgtataactaaactactaactgttattgataactagaatcagaatctaatgatgacgtaaccaagaagtttatctactgccaatttagctgcattatttttagcatctcgtttagattttccatcggccttatcgaatactcttccgtcgatgtctacacaggcataaaatgtaggagagttactaggcccaactgattcaatacgaaaagaccaatctctcctagtaatttggcagtactcattaataacggtgacagggttagcatctttccaatcaataatttttttagccggaataacatcatcaaaagacttatgatcctctctcattgatttttcgcgggatacatcatctattatgacgtcagccatagcatcagcatccggcttatccgcctccgttgtcataaaccaacgaggaggaatatcgtcggagctgtacaccatagcactacgttgaagatcgtacagagctttattaacttctcgcttctccatattaagttgtctagttagttgtgcagcagtagctccttcgattccaatgtttttaatagccgcacacacaatctctgcgtcagaacgctcgtcaatatagatcttagacatttttagagagaactaacgcaaccagcaataaaactgaacctactttatcatttttttattcatcatcctctggtggttcgtcgttcctatcaaatgtagctctgattaacccgtcatctataggtgatgctggttctggagattctggaggagatggattattatctggaagaatctctgttatttccttgttttcatgtatcgattgcgttgtaacattaagattgcgaaatgctctaaatttgggaggcttaaagtgttgtttgcaatctctacacgcgtgtctaactagtggaggttcgtcagctgctctagtttgaatcatcatcggcgtagtattcctacttttacagttaggacacggtgtattgtatttctcgtcgagaacgttaaaataatcgttgtaactcacatcctttattttatctatattgtattctactcctttcttaatgcattttataccgaataagagatagcgaaggaattctttttcggtgccgctagtacccttaatcatatcacatagtgttttatattccaaatttgtggcaatagacggtttatttctatacgatagtttgtttctggaatcctttgagtattctataccaatattattctttgattcgaatttagtttcttcgatattagattttgtattacctatattcttgatgtagtactttgatgatttttccatggcccattctattaagtcttccaagttggcatcatccacatattgtgatagtaattctcggatatcagtagcggctaccgccattgatgtttgttcattggatgagtaactactaatgtatacattttccatttataacacttatgtattaactttgttcatttatattttttcattattatgttgatattaacaaaagtgaatatatatatgttaataattgtattgtggttatacggctacaattttataatgagtgaaagtcagtgtccgatgatcaatgacgatagctttactctgaaaagaaagtatcaaatcgatagtgcggagtcaacaataaaaatggataagaagaggataaagtttcagaatagagccaaaatggtaaaagaaataaatcagacaataagagcagcacaaactcattacgagacattgaaactaggatacataaaatttaagagaatgattatgactactactctagaagatatagcaccatctattccaaataatcagaaaacttataaactattctcggacatttcagccatcggcaaagcatcacagaatccgagtaagatggtatatgctctgctgctttacatgtttcccaatttgtttggagatgatcatagattcattcgttatagaatgcatccaatgagtaaaatcaaacacaagatcttctctcctttcaaacttaatcttattagaatattagtggaagaaagattctataataatgaatgcagatctaataaatggagaataattggaacacaagttgataaaatgttgatagctgaatctgataaatatacaatagatgcaaggtataacctaaaacccatgtatagaatcaagggagaatctgaagaagataccctctttatcaaacagatggtagaacaatgtgtgacatcccaggaattggtggaaaaagtgttgaagatactgtttagagatttgttcaagagtggagaatacaaagcgtacagatacgatgatgatgtagaaaatggatttattggattggatacactaaaattaaacattgttcatgatatagttgaaccatgtatgcctgttcgtaggccagtggctaagatactgtgtaaagaaatggtaaataaatactttgagaatccgctacatattattggtaaaaatcttcaagagtgcattgactttgttagtgaataggcatttcatctttctccaatactaattcaaattgttaaattaataatggatagtataaatagttattagttataagatagtaaaaataattattagaataagagtgtagtatcatagataactctcttctataaaaatggattttattcgtagaaagtatcttatatacacagtagaaaataatatagattttttaaaggatgatacattaagtaaagtaaacaattttaccctcaatcatgtactagctctcaagtatctagttagcaattttcctcaacacgttattactaaggatgtattagctaataccaatttttttgttttcatacatatggtacgatgttgtaaagtgtacgaagcggttttacgacacgcatttgatgcacccacgttgtacgttaaagcattgactaagaattatttatcgtttagtaacgcaatacaatcgtacaaggaaaccgtgcataaactaacacaagatgaaaaatttttagaggttgccgaatacatggacgaattaggagaacttataggcgtaaattatgacttagttcttaatccattatttcacggaggggaacccatcaaagatatggaaatcatttttttaaaactgtttaagaaaacagacttcaaagttgttaaaaaattaagtgttataagattacttatttgggcatacctaagcaagaaagatacaggcatagagtttgcggataatgatagacaaaatatatacactctatttcaacaaactggtagaatcgtccatagcaatctaacagaaacgtttagagattatatctttcccggagataagactagctattgggtgtggttaaacgaaagtatagctaatgatgcggatatcgttcttaatagacacgccattaccatgtatgataaaattcttagttatatatactctgagataaaacaaggacgcgttaataaaaacatgcttaagttagtttatatctttgagcctgaaaaagatatcagagaacttctgctagaaatcatatatgatattcctggagatatcctatctattattgatgcaaaaaacgacgattggaaaaaatattttattagtttttataaagctaattttattaacggtaatacatttattagtgatagaacgtttaacgaggacttattcagagttgttgttcaaatagatcccgaatatttcgataatgaacgaattatgtctttattctctacgagtgctgcggacattaaacgatttgatgagttagatattaataacagttatatatctaatataatttatgaggtgaacgatatcacattagatacaatggatgatatgaagaagtgtcaaatctttaacgaggatacgtcgtattatgttaaggaatacaatacatacctgtttttgcacgagtcggatcccatggtcatagagaacggaatactaaagaaactgtcatctataaaatccaagagtagacggctgaacttgtttagcaaaaacattttaaaatattatttagacggacaattggctcgtctaggtcttgtgttagatgattataaaggagacttgttagttaaaatgataaaccatcttaagtctgtggaggatgtatccgcattcgttcgattttctacagataaaaaccctagtattcttccatcgctaatcaaaactattttagctagttataatatttccatcatcgtcttatttcaaaggtttttgagagataatctatatcatgtagaagaattcttggataaaagcatccatctaaccaagacggataagaaatatatacttcaattgataagacacggtagatcatagaacagaccaaatatattattaataatttgtatatacatagatataattatcacacatttttgataaatgggaactgctgcaacaattcagactcccaccaaattaatgaataaagaaaatgcagaaatgattttggaaaaaattgttgatcatatagttatgtatattagtgacgaatcaagtgattcagaaaataatcctgaatatattgattttcgtaacagatacgaagactatagatctctcattataaaaagtgatcacgagtttgtaaagctatgtaaaaatcatgcggagaaaagttctccagaaacgcaacaaatgattatcaaacacatatacgaacaatatcttattccagtatctgaagtactattaaaacctataatgtccatgggtgacataattacatataacggatgtaaagacaatgaatggatgctagaacaactctctaccctaaactttaacaatctccgcacatggaactcatgtagcataggcaatgtaacgcgtctgttttatacattttttagttatctgatgaaagataaactaaatatataagtataatcccattctaatactttaacctgatgtattagcatcttattagaatattaacctaactaaaagacataacataaaaactcattacatagttgataaaaagcggtaggatataaatattatggctgccaccgttccgcgttttgacgacgtgtacaaaaatgcacaaagaagaattctagatcaagaaacattttttagtagaggtctaagtagaccgttaatgaaaaacacatatctatttgataattacgcgtatggatggataccagaaactgcaatttggagtagtagatacgcaaacctagatgctagtgactattatcccatttcgttgggattacttaaaaagttcgagtttctcatgtctctatataaaggtcctattcccgtatatgaagaaaaagtaaatactgaattcatagccaatggatcgttctctggtagatacgtatcatatcttcgaaagttttctgcccttccaacaaacgagtttattagttttttgttactgacttccattccaatctataatatcttgttctggtttaaaaacacacagtttgatattactaaacacacattattcagatacgtctatacagataatgccaaacacctggcgttggctaggtatatgcatcaaacaggagactataagcctttgtttagtcgtctcaaagagaattatatatttaccggtcccgttccaataagtatcaaagatatagatcaccctaatcttagtagagcaagaagtccatccgattatgagacattagctaatattagtactatattgtactttaccaagtatgatccggtattaatgtttttattgttttacgtacctgggtattcaattactacaaaaattactccagccgtagaatatctaatggataaactgaatctaacaaagagcgacgtacaactgttgtaaattattttatgcttcgtaaaatgtaggttttgaaccaaacattctttcaaagaatgagatgcataaaactttattatccaatagattgactatttcggacgtcaatcgtttaaagtaaacttcgtaaaatattctttgatcactgccgagtttaaaacttctatcgataattgtctcatatgttttaatatttacaagttttttggtccatggtacattagccggacaaatatatgcaaaataatatcgttctccaagttctatagtttctggattatttttattatattcagtaactaaatacatattagggttatctgcggatttataatttgagtgatgcattctactcaacataaataattctagaggagacgatctactatcaaattcggatcgtaaatctgtttctaaagaacggagaatatctatacatacctgattagaattcatccgtccttcagacaacatctcagacagtctggttttgtacatcttaatcatattcttatgaaacttggaaacatctcttctagtttcactagtacctttattaattctctcaggtacagattttgaattcgacgatgctgagtatttcatcgttgtatatttcttcttcgattgcataatcagattcttatataccgcctcaaactctattttaaaattattaaacaatactctattattaatcagtcgttctaactctttcgctatttctatagacttatctacatcttgactgtctatctctgtaaacacggagtcggtatctccatacacgctacgaaaacgaaatctgtaatctataggcaacgatgttttcacaatcggattaatatctctatcgtccatataaaatggattacttaatggattggcaaaccgtaacataccgttagataactctgctccatttagtaccgattctagatacaagatcattctacgtcctatggatgtgcaactcttagccgaagcgtatgagtatagagcactatttctaaatcccatcagaccatatactgagttggctactatcttgtacgtatattgcatggaatcatagatggccttttcagttgaactggtagcctgttttagcatctttttatatctggctctctctgccaaaaatgttcttaatagtctaggaatggttccttctatcgatctatcgaaaattgctatttcagagatgaggttcggtagtctaggttcacaatgaaccgtaatatatctaggaggtggatatttctgaagcaatagctgattatttatttcttcttccaatctattggtactaacaacgacaccgactaatgtttccggagatagatttccaaagatacacacattaggatacagactgttataatcaaagattaatacattattactaaacattttttgttttggagcaaataccttaccgccttcataaggaaacttttgttttgtttctgatctaactaagatagttttagtttccaacaatagctttaacagtggacccttgatgactgtactcgctctatattcgaataccatggattgaggaagcacatatgttgacgcacccgcgtctgtttttgtttctactccataatactcccacaaatactgacacaaacaagcatcatgaatacagtatctagccatatctaaagctatgtttagattataatccttatacatctgagctaaatcaacgtcatcctttccgaaagataatttatatgtatcattaggtaaagtaggacataatagtacgactttaaatccattttcccaaatatctttacgaattactttacatataatatcctcatcaacagtcacataattacctgtggttaaaacctttgcaaatgcagcggctttgcctttcgcgtctgtagtatcgtcaccgatgaacgtcatttctctaactcctctatttaatactttacccatgcaactgaacgcgttcttggatatagaatccaatttgtacgaatccaatttttcaaatttttgaatgaatgaatatagatcgaaaaatatagttccattattgttattaacgtgaaacgtagtattggccatgccgcctactcccttatgactagactgatttctctcataaatacagagatgtacagcttcctttttgtccggagatctaaagataattttctctcctgttaataactctagacgattagtaatatatctcagatcaaagttatgtccgttaaaggtaacgacgtagtcgaacgttagttccaacaattgtttagctattcgtaacaaaactatttcagaacatagaactagttctcgttcgtaatccatttccattagtgactgtatcctcaaacatcctctatcgacggcttcttgtatttcctgttccgttaacatctcttcattaatgagcgtaaacaataatcgtttaccacttaaatcgatataacagtaacttgtatgcgagattgggttaataaatacagaaggaaacttcttatcgaagtgacactctatatctagaaataagtacgatcttgggatatcgaatctaggtatttttttagcgaaacagttacgtggatcgtcacaatgataacatccattgttaatctttgtcaaatattgctcgtccaacgagtaacatccgtctggagatatcccgttagaaatataaaaccaactaatattgagaaattcatccatggtggcattttgtatgctgcgtttctttggctcttctatcaaccacatatctgcgacggagcattttctatctttaatatctagattataacttattgtctcgtcaatgtctatagttctcatctttcccaacggcctcgcattaaatggaggaggagacaatgactgatatatttcgtccgtcactacgtaataaaagtaatgaggaaatcgtataaatacggtctcgccatttcgacatctggatttcagatataaaaatctgttttcaccgtgactttcaaaccaattaatgcaccgaacatccatttatagaatttagaaatatattttcatttaaatgaatcccaaacattggggaagagccgtatggaccattatttttatagtactttcgcaagcgggtttagacggcaacatagaagcgtgtaaacgaaaactatatactatagttagcactcttccatgtcctgcatgtagacggcacgcgactatcgctatagaggacaataatgtcatgtctagcgatgatctgaattatatttattattttttcatcagattatttaacaatttggcatctgatcccaaatacgcgatcgatgtgacaaaggttaaccctttataaacttaacccattataaaacttatgattagtcacaactgaaataaccgcgtgattattttttggtataattctacacggcatggtttctgtgactatgaattcaacccccgttacattagtgaaatctttaacaaacagcaagggttcgtcaaagacataaaactcattgtttacaatcgaaatagaccccctatcacacttaaaataaaaaatatccttatcctttaccaccaaataaaattctgattggtcaatgtgaatgtattcacttaacagttccacaaatttatttattaactccgaggcacatacatcgtcggtattttttatggcaaactttactcttccagcatccgtttctaaaaaaatattaacgagttccatttatatcatccaatattattgaaatgacgttgatggacagatgatacaaataagaaggtacggtacctttgtccaccatctcctccaattcatgctctattttgtcattaactttaatgtatgaaaacagtacgccacatgcttccatgacagtgtgtaacactttggatacaaaatgtttgacattagtataattgtccaagactgtcaatctataatagatagtagctataatatattctatgatggtattgaagaagatgacaaccttggcatattgatcatttaacacagacatggtatcaacagatagcttgaatgaaagagaatcagtaattggaataagcgtcttctcgatagagtgtccgtataccaacatgtctgatattttgatgtattccattaaattatttagttttttctttttattctcgttaaacagcatttctgtcaacggaccccaacatcgttgaccgattaagttttgattgatttttccgtgtaaggcgtatctagtcagatcgtatagcctatccaataatccatcgtctgtgtgtagatcacatcgtacactttttaattctctatagaagagcgacagacatctggagcaattacagacagcaatttctttattctctacagatgtaagatacttgaagacattcctatgatgatgcagaattttggataacacggtattgatggtatctgttaccataattcctttgatggctgatagtgtcagagcacaagatttccaatctttgacaatttttagcaccattatctttgttttgatatctatatcagacagcatggtgcgtctgacaacacagggattaagacggaaagatgaaatgattctctcaacatcttcaatagataccttgctattttttctggcattatctatatgtgcgagaatatcctctagagaatcagtatcctttttgatgatagtggatctcaatgacatgggacgtttaaaccttcttattctatcaccagattgcatggtgatttgtcttctttcttttatcataatgtaatctctaaattcatcggcaaattgtctatatctaaaatcataatatgagatgtttacctctacaaatatctgttcgtccaatgttagagtatttacatcagttttgtattccaaattaaacatggcaacggatttaattttatattcctctattaagtcctcgtcgataataacagaatgtagataatcatttaatccgtcgtacatggttggaagatgcttgttgacaaaatctttaattgtcttgatgaaggtgggactatatctaacatcttgattaataaaatttataacattgtccataggatactttgtaactagttttatacacatctcttcatcggtaagtttagacagaatatcgtgaacaggtggtatattatattcatcagatatacgaagaacaatgtccaaatctatattgtttaatatattatatagatgtagcgtagctcctacaggaatatctttaactaagtcaatgatttcatcaaccgttagatctattttaaagttaatcatataggcattgatttttaaaaggtatgtagccttgactacattctcattaattaaccattccaagtcattgtgtgtaagaagattatattctatcataagcttgactacatttggtcccgataccattaaagaattcttatgatataaggaaacagattttaggtactcatctactctacaagaattttggagagccttaacgatatcagtgacgtttattatttcaggaggaaagaatctaacattgagaatatcggaattaatagcttccagatacagtgattttggcaatagtccgtgtaatccataatccagtaacacgagctggtgcttgctagacaccttttcaatgtttaatttttttgaaataagctttgataaagccttcctcgcaaattccggatacatgaacatgtcggcgacatgattaagtattgttttttcattatttttatattttctcaacaagttctcaataccccaatagatgatagaatatcacccaatgcgtccatgttgtctatttccaacaggtcgctatatccaccaatagaagtttttccaaaaaagattctaggaacagttctaccaccagtaatttgttcaaaataatcccgcaattcattttcgggtttaaattctttaatatcgacaatttcatacgctcctcttttgaaactaaacttatttagaatatccagtgcatttctacaaaaaggacatgtatacttgacaaaaattgtcactttgttattggccaacctttgttgtacaaattcctcggccattttaatatttaagtgatataaaactatctcgacttatttaactctttagtcgagatatatggacgcagatagctatatgatagccaactacagaaggcaaacgctataaaaaacataattacgacgagcatatttataaatatttttattcagcattacttgatatagtaatattaggcacagtcaaacattcaaccactctcgatacattaactctctcattttctttaacaaattctgcaatatcttcgtaaaaagattcttgaaactttttagaatatctatcgactctagatgaaatagcgttcgtcaacatactatgttttgtatacataaaggcgcccattttaacagtttctagtgacaaaatgctagcgatcctaggatcctttagaatcacatagattgacgattcgtctctcttagtaactctagtaaaataatcatacaatctagtacgcgaaataatattatccttgacttgaggagatctaaacaatctagttttgagaacatcgataagttcatcgggaatgacatacatactatctttaatagaactcttttcatccagttgaatggattcgtccttaaccaactgattaatgagatcttctattttatcattttccagatgatatgtatgtccattaaagttaaattgtgtagcgcttctttttagtctagcagccaatactttaacatcactaatatcgatatacaaaggagatgatttatctatggcattaagaattcgtttttcgacatccgtcaaaaccaattcctttttgcctgtatcatccagttttccatcctttgtaaagaaattattttctactagactattaataagactgataaggattcctccataattgcacaatccaaactttttaacaaaactagactttacgagatctacaggaatgcgtacttcaggttttttagcttgtgattttttcttttgcggacattttctagtaaccaactcatctaccatttcattgattttagcagtgaaataagctttcaatgcacgggcactgatactattgaaaacgagttgatcttcaaattccgccatttaagttcaccaaacaacttttaaatacaaatatatcaatagtagtagaataagaactataaaaaaaataataattaaccaaccccaacaaccggtattattagttgatgtggtagttttctcatcacttagaacagatttaacaatttctataaagtctgtcaaatcatcttccggagaccccataaatacaccaaatatagcggcgtacaacttatccatttatacattgaatattggcttttctttatcgctatcttcatcatattcatcatcaatatcaacaagtcccagattacgagccagatcttcttctacattttcagtcattgatacacgttcactatctccagagagtccgataacgttagccaccacttctctatcaatgattagtttcttgagcgcgaaagtaatttttgtttccgttccggatctatagaagacgataggtgtgataattgccttggccaattgtctttctcttttactgagtgattctagttcaccttctatagatctgagaatggatgattctccagtcgaaacatattctaccatggatccgtttaatttgttgatgaagatggattcatccttaaatgttttctctgtaatagtttccaccgaaagactatgcaaagaatttggaatgcgttccttgtgcttaatgtttccatagacggcttctagaagttgatacaacataggactagccgcggtaacttttatttttagaaagtatccatcgcttctatcttgtttagatttatttttataaagtttagtctctccttccaacataataaaagtggaagtcatttgactagataaactatcagtaagttttatagagatagacgaacaattagcgtattgagaagcatttagtgtaacgtattcgatacattttgcattagatttactaatcgattttgcatactctataacacccgcacaagtctgtagagaatcgctagatgcagtaggtcttggtgaagtttcaactctcttcttgattaccttactcatgattaaacctaaataattgtactttgtaatataatgatatatattttcactttatctcatttgagaataaaaatgtttttgtttaaccactgcatgatgtacagatttcggaatcgcaaaccaccagtggttttattttatccttgtccaatgtgaattgaatgggagcggatgcgggtttcgtacgtagatagtacattcccgtttttagaccgagactccatccgtaaaaatgcatactcgttagtttggaataactcggatctgctatatggatattcatagattgactttgatcgatgaaggctcccctgtctgcagccatttttatgatcgtcttttgtggaatttcccaaatagttttataaactcgcttaatatcttctggaaggtttgtattctgaatggatccaccatctgccataatcctattcttgatctcatcattccataattttctctcggttaaaactctaaggagatgcggattaactacttgaaattctccagacaatactctccgagtgtaaatattactggtatacggttccaccgactcattatttcccaaaatttgagcagttgatgcagtcggcataggtgccaccaataaactatttctaagaccgtatgttctgattttatcttttagaggttcccaattccaaagatccgacggtacaacattccaaagatcatattgtagaataccgttactggcgtacgatcctacatatgtatcgtatggtccttccttctcagctagttcacaactcgcctctaatgcaccgtaataaatggtttcgaagatcttcttatttagatcttgtgcttccaggctatcaaatggataatttaagagaataaacgcgtccgctaatccttgaacaccaataccgataggtctatgtctcttattagagatttcagcttctggaataggataataattaatatctataattttattgagatttctgacaattactttgaccacatccttcagtttgagaaaatcaaatcgcccatctattacaaacatgttcaaggcaacagatgccagattacaaacggctacctcattagcatccgcatattgtattatctcagtgcaaagattactacacttgatagttcctaaattttgttgattactctttttgttacacgcatccttataaagaatgaatggagtaccagtttcaatctgagattctataatcgctttccagacgactcgagcctttattatagatttgtatctcctttctctttcgtatagtgtatacaatcgttcgaactcgtctccccaaacattgtccaatccaggacattcatccggacacatcaacgaccactctccgtcatccttcactcgtttcataaagagatcaggaatccaaagagctataaatagatctctggttctatgttcctcgtttcctgtattctttttaagatcgaggaacgccataatatcagaatgccacggttccaagtatatggccataactccaggccgtttgtttcctccctgatctatgtatctagcggtgttattataaactctcaacattggaataataccgtttgatataccattggtaccggagatatagcttccactggcacgaatattactaattgatagacctattccccctgccattttagagattaatgcgcatcgttttaacgtgtcatagataccctctatgctatcatcgatcatgttaagtagaaaacagctagacatttggtgacgactagttcccgcattaaataaggtaggagaagcgtgcgtaaaccatttttcagaaagtagattgtacgtctcaatagctgagtctatatcccattgatgaattcctactgcgacacgcattaacatgtgctgaggtctttcaacgatcttgttgtttattttcaacaagtaggatttttccaaagttttaaaaccaaaatagttgtatgaaaagtctcgttcgtaaataataaccgagttgagtttatccttatatttgttaactatatccatggtgatacttgaaataatcggagaatgtttcccatttttaggattaacatagttgaataaatcctccatcacttcactaaatagtttttttgtttccttgtgtagatttgatacggctattctggcggctagaatggcataatccggatgttgtgtagtacaagtggctgctatttcggctgccagagtgtccaattctaccgttgttactccattatatattccttgaataaccttcatagctattttaataggatctatatgatccgtgtttaagccataacataattttctaatacgagacgtgattttatcaaacatgacattttccttgtatccatttcgtttaatgacaaacatttttgttggtgtaataaaaaaattatttaacttttcattaatagggatttgacgtatgtagcgtacaaaatgattgttcctggtatatagataaagagtcctatatatttgaaaatcgttacggctcgattaaactttaatgattgcatagtgaatatatcattaggatttaactccttgactatcatggcggcgccagaaattaccatcaaaagcattaatacagttataccgatcgcagttagaacggttatagcatccaccatttatatctaaaaattagatcaaagaatatgtgacaaagtcctagttgtatactgagaattgacgaaacaatgtttcttacatatttttttcttattagtaaccgacttaatagtaggaactggaaaactagacttgattattctataagtatagatacccttccaaataatattctctttgataaaagttccagaaaatgtagaattttttaaaaagttatcttttgctattaccaagattgtgtttagacgcttattattaatatgagtgatgaaatccacaccgcctctagatatcgcctttatttccacattagatggtaaatccaatagtgaaactatctttttaggaatgtatggactcgcgtttagaggagtaaacgtcttaggcgtcggaaaggatgattcatcaaacgaataaacaatttcacaaatggatgttaatgtattagtaggaaattttttgacgctattggaattgaagattctaatggatgatgttctacctatttcatccgataacatgttaatttccgacaccaacggttttaatatttcgatgatatacggtagtctctctttcggacttatatagcttattccacaatacgagtcattatatactccaaaaaacaaaataactagtataaaatctgtatcgaatgggaaaaacgaaattatcgacataggtatagaatccggaacattgaacgtattaatacttaattctttttctgtggtaagtaccgataggttattgacattgtatggttttaaatattctataacttgagacttgatagatattagtgatgaattgaaaattatttttatcaccacgtgtgtttcaggatcatcgtcgacgcccgtcaaccaaccgaacggagtaaaataaatatcattaatatatgctctagatattagtatttttatcaatcctttgattatcatcttctcgtaggcgaatgattccatgatcaagagtgatttaagaacatcctccggagtattaatgggcttagtaaacagtccatcgttgcaataataaaagttatccaagttaaaggatattatgcattcgtttaaagatatcacctcatctgacggagacaattttttggtaggttttagagactttgaagctacttgtttaacaaagttattcatcgtcgtctactattctatttaattttgtagttaatttatcacatatcacattaattgactttttggtccacttttccatacgtttatattcttttaatcctgcgttatccgtttccgttatatccagggatagatcttgcaagttaaatagaatgctcttaaataatgtcattttcttatccgctaaaaatttaaagaatgtataaacctttttcagagatttgaaactcttaggtggtgtcctagtacacaatatcataaacaaactaataaacattccacattcagattccaacagctgattaacttccacattaatacagcctattttcgctccaaatgtacattcgaaaaatctgaataaaacatcgatgtcacaatttgtattatccaatacagaatgtttgtgattcgtgttaaaaccatcggagaaggaatagaaataaaaattattatagtggtggaattcagttggaatattgcctccggagtcataaaaggatactaaacattgttttttatcataaattacacatttccaatgagacaaataacaaaatccaaacattacaaatctagaggtagaacttttaattttgtctttaagtatatacgataagatatgtttattcataaacgcgtcaaatttttcatgaatcgctaaggagtttaagaatctcatgtcaaattgtcctatataatccacttcggatccataagcaaactgagagactaagttcttaatacttcgattgctcatccaggctcctctctcaggctctattttcatcttgacgacctttggattttcaccagtatgtattcctttacgtgataaatcatcgattttcaaatccatttgtgagaagtctatcgccttagatactttttcccgtagtcgaggtttaaaaaaatacgctaacggtatactagtaggtaactcaaagacatcatatatagaatggtaacgcgtctttaactcgtcggttaactctttcttttgatcgagttcgtcgctactattgggtctgctcaggtgccccgactctactagttccaacatcataccgataggaatacaagacactttgccggcggttgtagatttatcatatttttccactacatatccgttacaatttgttaaaaatttagatacatctatattgctacataatccagctagtgaatatatatgacataataaattggtaaatcctagttctggtattttactaattactaaatctgtatatctttccatttatcatggaaaagaatttaccagatatcttcttttttccaaactgcgttaatgtattctcttacaaatattcacaagatgaattcagtaatatgagtaaaacggaacgtgatagtttctcattggccgtgtttccagttataaaacatagatggcataacgcacacgttgtaaaacataaaggaatatacaaagttagtacagaagcacgtggaaaaaaagtatctcctccatcactaggaaaacccgcacacataaacctaaccgcgaagcaatatatatacagtgaacacacaataagctttgaatgttatagttttctaaaatgtataacaaatacagaaatcaattcgttcgatgagtatatattaagaggactattagaagctggtaatagtttacagatattttccaattccgtaggtaaacgaacagatactataggtgtactagggaataagtatccatttagcaaaattccattggcctcattaactcctaaagcacaacgagagatattttcagcgtggatttctcatagacctgtagttttaactggaggaactggagtgggtaagacgtcacaggtacccaagttattgctttggtttaattatttatttggtggattctctactctagataaaatcactgactttcacgaaagaccagtcattctatctcttcctaggatagctttagttagattgcatagcaataccattttaaaatcattgggatttaaggtactagatggatctcctatttctttacggtacggatctataccggaagaattaataaacaaacaaccaaaaaaatatggaattgtattttctacccataagttatctctaacaaaactatttagttatggcactcttattatagacgaagttcatgagcatgatcaaataggagatattattatagcagtagcgagaaagcatcatacgaaaatagattctatgtttttaatgactgccacgttagaggatgacagggaacggctaaaagtatttttacctaatcccgcatttatacatattcctggagatacactgtttaaaattagcgaggtatttattcataataagataaatccatcttccagaatggcatacatagaagaagaaaagagaaatttagttactgctatacagatgtatactcctcctgatggatcatccggtatagtctttgtggcatccgttgcacagtgtcacgaatataaatcatatttagaaaaaagattaccgtatgatatgtatattattcatggtaaggtcttagatatagacgaaatattagaaaaagtgtattcatcacctaatgtatcgataattatttctactccttatttggaatccagcgttactatacgcaatgttacacacatttatgatatgggtagagtttttgtccccgctccttttggaggatcgcaacaatttatttctaaatctatgagagatcaacgaaaaggaagagtaggaagagttaatcctggtacatacgtctatttctatgatctgtcttatatgaagtctatacagcgaatagattcagaatttctacataattatatattgtacgctaataagtttaatctaacactccccgaagatttgtttataatccctacaaatttggatattctatggcgtacaaaggaatatatagactcgttcgatattagtacagaaacatggaataaattattatccaattattatatgaagatgatagagtatgctaaactttatgtactaagtcctattctcgctgaggagttggataactttgagaggacgggagaattaactagtattgtacgagaagccattttatctctaaatttacaaattaagattttaaattttaaacataaagatgatgatacgtatatacacttttgtaaaatattattcggtgtctataacggaacaaacgctactatatattatcatagacctctaacgggatatatgaatatgatttcagatactatatttgttcctgtagataataactaaaaatcaaactctaatgaccacatctttttttagagatgaaaaattttccacatctccttttgtagacacgactaaacattttgcagaaaaaagtttattagtgtttagataatcgtatacttcatcagtgtagatagtaaatgtgaacagataaaaggtattcttgctcaatagattggtaaattccatagaatatattaatcctttcttcttgagatcccacatcatttcaaccagagacgttttatccaatgatttacctcgtactataccacatacaaaactagattttgcagtgacgtcgtacctggtattcctaccaaacaaaattttacttttagttcttttagaaaattctaaggtagaatctctatttgccaatatgtcatctatggaattaccactagcaaaaaatgatagaaatatatattgatacatcgcagctggttttgatctactatactttaaaaacgaatcagattccataattgcctgtatatcatcagctgaaaaactatgttttacacgtattccttcggcatttctttttaatgatatatcttgtttagacaatgataaagttatcatgtccatgagagacgcgtctccgtatcgtataaatatttcattagatgttagacgcttcattaggggtatacttctataaggtttcttaatcagtccatcattggttgcgtcaagaactactatcggatgttgttgggtatctctagtgttacacatggccttactaaagtttgggtaaataactatgatatctctattaattatagatgcatatatttcattcgtcaaggatattagtatcgacttgctatcgtcattaatacgtgtaatgtaatcatataaatcatgcgatagccaaggaaaatttaaatagatgttcatcatataatcgtcgctataattcatattaatacgttgacattgactaatttgtaatatagcctcgccacgaagaaagctctcgtattcagtttcatcgataaaggataccgttaaatataactggttgccgatagtctcatagtctattaagtggtaagtttcgtacaaatacagaatccctaaaatattatctaatgttggattaatctttaccataactgtataaaatggagacggagtcataactattttaccgtttgtacttactggaatagatgaaggaataatctccggacatgctggtaaagacccaaatgtctgtttgaagaaatccaatgttccaggtcctaatctcttaacaaaaattacgatattcgatcccgatatcctttgcattctatttaccagcatatcacgaactatattaagattatctatcatgtctattctcccaccgttatataaatcgcctccgctaagaaacgttagtatatccatacaatggaatacttcatttctaaaatagtattcgttttctaattctttaatgtgaaatcgtatactagaaagggaaaaattatctttgagttttccgttagaaaagaaccacgaaactaatgttctgattgcgtccgattccgttgctgaattaatggatttacaccaaaaactcatataacttctagatgtagaagcattcgctaaaaaattagtagaatcaaaggatataagtagatgttccaacaagtgagcaattcccaagatttcatctatatcattctcgaatccgaaattagaaattcccaagtagatatcctttttcatccgatcgttgatgaaaatacgaactttattcggtaagacaatcatttactaaggagtaaaataggaagtaatgttcgtatgtcgttatcatcgtataaattaaaggtgtgttttttaccattaagtgacattataattttaccaatattggaattataatataggtgtatttgcgcactcgcgacggttgatgcatcggtaaatatagctgtatctaatgttctagtcggtatttcatcatttcgctgtctaataatagcgttttctctatctgtttccattacagctgcctgaagtttattggtcggataatatgtaaaataataagaaatacatacgaataacaaaaataaaataagatataataaagatgccatttagagatctaattttgtttaacttgtccaaattcctacttacagaagatgaggaatcgttggagatagtgtcttccttatgtagaggatttgaaatatcttataatgacttgataacttactttccagataggaaataccataaatatatttataaagtatttgaacatgtagatttatcggaggaattaagtatggaattccatgatacaactctgagagatttagtctatcttagattgtacaagtattccaagtgtatacggccgtgttataaattaggagataatctaaaaggcatagttgttataaaggacaggaatatttatattagggaagcaaatgatgacttgatagaatatctcctcaaggaatacactcctcagatttatacatattctaatgagcgcgtccccataactggttcaaaattaattctttgtggattttctcaagttacatttatggcgtatacaacgtcgcatataacaacaaataaaaaggtagatgttctcgtttccaaaaaatgtatagatgaactagtcgatccaataaattatcaaatacttcaaaatttatttgataaaggaagcggaacaataaacaaaatactcaggaagatattttattcggtaacaggtggccaaactccataggtagctttttctatttcggattttagaatttccaaattcaccagcgatttatcggttttggtgaaatccaaggatttattaatgtccacaaatgccatttgttttgtctgtggattgtatttgaaaatggaaacgatgtagttagatagatgcgctgcgaagtttcctattagggttccgcgcttcacgtcacccagcatacttgaatcaccatcctttaaaaaaaatgataagatatcaacatggagtatatcatactcgaattttaattcttctactgactcactgacattttcacaaatactacaatacggtttaccgaaaataatcagtacgttcttcatttatgggtatcaaaaacttaaaatcgttactgctggaaaataaatcactgacgatattagatgataatttatacaaagtatacaatggaatatttgtggatacaatgagtatttatatagccgtcgccaattgtgtcagaaacttagaagagttaactacggtattcataaaatacgtaaacggatgggtaaaaaagggagggcatgtaaccctttttatcgatagaggaagtataaaaattaaacaagacgttagagacaagagacgtaaatattctaaattaaccaaggacagaaaaatgttagaattagaaaagtgtacatccgaaatacaaaatgttaccggatttatggaagaagaaataaaggcagaaatgcaattaaaaatcgataaactcacatttcaaatatatttatctgattctgataacataaaaatatcattgaatgagatactaacacatttcaacaataatgagaatgttacattattttattgtgatgaacgagacgcagaattcgttatgtgtctcgaggctaaaacacatttctctaccacaggagaatggccgttgataataagtaccgatcaggatactatgctatttgcatctgctgataatcatcctaagatgataaaaaacttaactcaactgtttaaatttgttccctcggcagaggataactatttagcaaaattaacggcgttagtgaatggatgtgatttctttcctggactctatggggcatctataacacccaccaacttaaacaaaatacaattgtttagtgattttacaatcgataatatagtcactagtttggcaattaaaaattattatagaaagactaactctaccgtagacgtgcgtaatattgttacgtttataaacgattacgctaatttagacgatgtctactcgtatattcctccttgtcaatgcactgttcaagaatttatattttccgcattagatgaaaaatggaatgaatttaaatcatcttatttagaaagcgtgccgttaccctgccaattaatgtacgcgttagaaccacgcaaggagattgatgtttcagaagttaaaactttatcatcttatatagatttcgaaaatactaaatcagatatcgatgttataaaatctatatcctcgatcttcggatattctaacgaaaactgtaacacgatagtattcggcatctataaggataatttactactgagtataaataattcattttactttaacgatagtctgttaataaccaatactaaaagtgataatataataaatataggttactagattaaaaatggtgttccaactcgtgtgctctacatgcggtaaagatatttctcacgaacgatataaattgattatacgaaaaaaatcattaaaggatgtactcgtcagtgtaaagaacgaatgttgtaggttaaaattatctacacaaatagaacctcaacgtaacttaacagtgcaacctctattggatataaactaatatggatccggttaattttatcaagacatatgcgcctagaggttctattatttttattaattataccatgtcattaacaagtcatttgaatccatcgatagaaaaacatgtgggtatttattatggtacgttattatcggaacacttggtagttgaatctacctatagaaaaggagttcgaatagtcccattggatagtttttttgaaggatatcttagtgcaaaagtatacatgttagagaatattcaagttatgaaaatagcagctgatacgtcattaactttattgggtattccgtatggatttggtcatgatagaatgtattgttttaaattggtagctgactgttataaaaatgccggtattgatacatcgtctaaacgaatattgggcaaagatatttttctgagccaaaacttcacagacgataatagatggataaagatatatgattctaataatttaacattttggcaaattgattaccttaaagggtgagttaatatgcataactactcctccgttgttttttccctcgttctttttcttaacgttgtttgccatcactctcataatgtaaagatattctaaaatggtaaacttttgcatatcggacgcagaaattggtataaatgttgtaattgtattatttcccgtcaatggactagtcacagctccatcagttttatatcctttagagtatttctcactcgtgtctaacattctagagcattccatgatctgtttatcgttgatattggccggaaagatagattttttattttttattatattactattggcaattgtagatataacttctggtaaatatttttctaccttttcaatctcttctattttcaagccggctatatattctgctatattgttgctagtatcaataccttttctggctaagaagtcatatgtggtattcactatatcagttttaactggtagttccattagcctttccacttctgcagaataatcagaaattggttctttaccagaaaatccagctactataataggctcaccgatgatcattggcaaaatcctatattgtaccagattaatgagagcatatttcatttccaataattctgctagttcttgagacattgatttatttgatgaatctagttggttctctagatactctaccatttctgccgcatacaataacttgttagataaaatcagggttatcaaagtgtttagcgtggctagaatagtgggcttgcatgtattaaagaatgcggtagtatgagtaaaccgttttaacgaattatatagtctccagaaatctgtggcgttacatacatgagccgaatgacatcgaagattgtccaatatttttaatagctgctctttgtccattatttctatatttgactcgcaacaattgtagataccattaatcaccgattcctttttcgatgccggacaatagcacaattgtttagctttggactctatgtattcagaattaatagatatatctctcaatacagattgcactatacattttgaaactatgtcaaaaattgtagaacgacgctgttctgcagccatttaactttaaataatttacaaaaatttaaaatgagcatccgtataaaaatcgataaactgcgccaaattgtggcatatttttcagagttcagtgaagaagtgtctataaatgtagactcgacggatgagttaatgtatatttttgccgccttgggcggatctgtaaacatttgggcaattatacctctaagtgcatcagtgttttaccgaggagccgaaaatattgtgtttaatcttcctgtgtccaaggtaaaatcgtgtttgtgtagttttcacaatgatgccatcatagatatagaacctgatctggaaaataatctagtaaaactttctagttatcatgtagtaagtgtcgattgtaacaaggaactgatgcctattaggacagatactactatttgtctaagtatagatcaaaagaaatcttacgtgtttaattttcacaagtatgaagaaaaatgttgtggtagaaccgtcattcatctagaatggttgttgggctttatcaagtgtattagtcagcatcagcatctggctattatgtttaaagatgacaatattattatgaagactcctggtaatactgatgcgttttccagggaatattctatgactgaatgttctcaagaactacaaaagttttctttcaaaatagctatctcgtctctcaacaaactacgaggattcaaaaagagagtcaatgtttttgaaactagaatcgtaatggataatgacgataacattttaggaatgttgttttcggatagagttcaatcctttaagatcaacatctttatggcgtttttagattaatactttcaatgagataaatatgggtggcggagtaagtgttgagctccctaaacgggatccgcctccgggagtacccactgatgagatgttattaaacgtggataaaatgcatgacgtgatagctcccgctaagcttttagaatatgtgcatataggaccactagcaaaagataaagaggataaagtaaagaaaagatatccagagtttagattagtcaacacaggacccggtggtctttcggcattgttaagacaatcgtataatggaaccgcacccaattgctgtcgcacttttaatcgtactcattattggaagaaggatggaaagatatcagataagtatgaagagggtgcagtattagaatcgtgttggccagacgttcacgacactggaaaatgcgatgttgatttattcgactggtgtcagggggatacgttcgatagaaacatatgccatcagtggatcggttcagcctttaataggagtaatagaactgtagagggtcaacaatcgttaataaatctgtataataagatgcaaacattatgtagtaaagatgctagtgtaccaatatgcgaatcatttttgcattatttacgcgcacacaatacagaagatagcaaagagatgatcgattatattctaagacaacagtctgcggactttaaacagaaatatatgagatgtagttatcccactagagataagttagaagagtcattaaaatatgcggaacctcgagaatgttgggatccagagtgttcgaatgccaatgttaatttcttactaacacgtaattataataatttaggactttgcaatattgtacgatgtaataccagcgtgaacaacttacagatggataaaacttcctcattaagattgtcatgtggattaagcaatagtgatagattttctactgttcccgtcaatagagcaaaagtagttcaacataatattaaacactcgttcgacctaaaattgcatttgatcagtttattatctctcttggtaatatggatactaattgtagctatttaaatgggtgccgcggcaagcatacagacgacggtgaatacactcagcgaacgtatctcgtctaaattagaacaagaagcgaacgctagtgctcaaacaaaatgtgatatagaaatcggaaatttttatatccgacaaaaccatggatgtaacctcactgttaaaaatatgtgctctgcggacgcggatgctcagttggatgctgtgttatcagccgctacagaaacatatagtggattaacaccggaacaaaaagcatacgtgccagctatgtttactgctgcgttaaacattcagacgagtgtaaacactgttgttagagattttgaaaattatgtgaaacagacttgtaattctagcgcggtcgtcgataacaaattaaagatacaaaacgtaatcatagatgaatgttacggagccccaggatctccaacaaatttggaatttattaatacaggatctagcaaaggaaattgtgccattaaagcgttgatgcaattgacgactaaggccactactcaaatagcacctagacaagttgctggtacaggagttcagttttatatgattgttatcggtgttataatattggcagcgttgtttatgtactatgccaagcgtatgttgttcacatccaccaatgataaaatcaaacttattttagccaataaggaaaacgtccattggactacttacatggacacattctttagaacttctccgatggttattgctaccacggatatgcaaaactgaaaatatattgataatattttaatagattaacatggaagttatcgctgatcgtctagacgatatagtgaaacaaaatatagcggatgaaaaatttgtagattttgttatacacggtctagagcatcaatgtcctgctatacttcgaccattaattaggttgtttattgatatactattatttgttatagtaatttatatttttacggtacgtctagtaagtagaaattatcaaatgttgttggtggtgctagtcatcacattaactattttttattactttatactataatagtactagactgacttctaacaaacatctcacctgccataaataaatgcttgatattaaagtcttctatttctaacactattccatctgtggaaaataatactctgacattatcgctaattgacacatcggtgagtgatatgcctataaagtaataatcttctttgggcacatataccagtgtaccaggttctaacaacctatttactggtgctcctgtagcatactttttctttaccttgagaatatccatcgtttgcttggtcaatagcgatatgtgattttttatcaaccactcaaaaaagtaattggagtgttcatatcctctacgggctattgtctcatggccgtgtatgaaatttaagtaacacgactgtggtagatttgttctatagagccgattgccgcaaatagatagaactaccaatatgtctgtacaaatgttaaacattaattgattaacagaaaaaacaatgttcgttctgggaatagaaaccagatcaaaacaaaattcgttagaatatatgccacgtttatacatggaatataaaataactacagtttgaaaaataacagtatcatttaaacatttaacttgcggggttaatctcacaactttactgtttttgaactgttcaaaatatagcatcgatccgtgagaaatacgtttagccgcctttaatagaggaaatcccaccgcctttctggatctcaccaacgacgatagttctgaccagcaactcatttcttcatcatccacctgttttaacatataataggcaggagatagatatccgtcattgcaatattccttctcgtaggcacacaatctaatattgataaaatctccattctcttctctgcatttattatcttgtctcggtggctgattaggctgtggtcttggtttaggccttggtctatcgttgttgaatctattttggtcattaaatctttcatttcttcctggtatatttctatcacctcgtttggttggatttttgtctatattatcgtttgtaacatcggtacgggtattcatttatcacaaaaaaaacttctctaaatgagtctactgctagaaaacctcatcgaagaagataccatattttttgcaggaagtatatctgagtatgatgatttacaaatggttattgccggcgcaaaatccaaatttccaagatctatgctttctatttttaatatagtacctagaacgatgtcaaaatatgagttggagttgattcataacgaaaatatcacaggagcaatgtttaccacaatgtataatataagaaacaatttgggtctaggagatgataaactaactattgaagccattgaaaactatttcttggatcctaacaatgaagttatgcctcttattattaataatacggatatgactgccgtcattcctaaaaaaagtggtaggagaaagaataagaacatggttatcttccgtcaaggatcatcacctatcttgtgcattttcgaaactcgtaaaaagattaatatttataaagaaaatatggaatccgcgtcgactgagtatacacctatcggagacaacaaggctttgatatctaaatatgcgggaattaatgtcctgaatgtgtattctccttccacatccataagattgaatgccatttacggattcaccaataaaaataaactagagaaacttagtactaataaggaactagaatcgtatagttctagccctcttcaagaacccattaggttaaatgattttctgggactattggaatgtgttaaaaagaatattcctctaacagatattccgacaaaggattgattactataaatggagaatgttcctaatgtatactttaatcctgtgtttatagagcccacgtttaaacattctttattaagtgtttataaacacagattaatagttttatttgaagtattcgttgtattcattctaatatatgtattttttagatctgaattaaatatgttcttcatgcctaaacgaaaaatacccgatcctattgatagattacgacgtgctaatctagcgtgtgaagacgataaattaatgatctatggattaccatggatgacaactcaaacatctgcgttatcaataaatagtaaaccgatagtgtataaagattgtgcaaagcttttgcgatcaataaatggatcacaaccagtatctcttaacgatgttcttcgcagatgatgattcattttttaagtatttggctagtcaagatgatgaatcttcattatctgatatattgcaaatcactcaatatctagactttctgttattattattgatccaatcaaaaaataaattagaagctgtgggtcattgttatgaatctctttcagaggaatacagacaattgacaaaattcacagactttcaagattttaaaaaactgtttaacaaggtccctattgttacagatggaagggtcaaacttaataaaggatatttgttcgactttgtgattagtttgatgcgattcaaaaaagaatcctctctagctaccaccgcaatagatcctgttagatacatagatcctcgtcgtgatatcgcattttctaacgtgatggatatattaaagtcgaataaagtgaacaataattaattctttattgtcatcatgaacggcggacatattcagttgataatcggccccatgttttcaggtaaaagtacagaattaattagacgagttagacgttatcaaatagctcaatataaatgcgtgactataaaatattctaacgataatagatacggaacgggactatggacgcatgataagaataattttgaagcattggaagcaactaaactatgtgatgtcttggaatcaattacagatttctccgtgataggtatcgatgaaggacagttctttccagacattgtttaattctgtgagcgtatggcaaacggtaccgagctcaaaaattgaaaaactagcgtctttttttgctcgaagtcgacgccaccatgcttctggcgcggatgaacccgcaggtgcagcccgagaacaacggggcggacacgggtccagagcagccccttcgggcgcgcaaaactgcggagctgctggtggtgaaggagcgcaacggcgtccagtgcctgctggcgccccgcgacggcgacgcgcagccccgggagacctggggcaagaagatcgacttcctgctgtccgtagtcggcttcgcagtggacctggccaacgtgtggcgcttcccctacctctgctacaagaacggcggcggtgccttcttgatcccgtacacactgttccttatcatcgcggggatgcccctgttctacatggagctggctctgggacagtacaaccgggagggggctgccaccgtttggaaaatctgcccattcttcaaaggcgttggctatgctgtcatcctgatcgccctgtacgttggcttctactacaacgtcatcatcgcctggtcactctactacctcttctcctccttcaccctcaacctgccctggaccgactgtggccacacctggaacagccccaactgtaccgaccccaagctcctcaatggctccgtgcttggcaaccacaccaagtactccaagtacaagttcacgccggcagccgagttttatgagcgtggtgtcctgcaccttcacgagagcagcgggattcatgacatcggcctgccccagtggcagctcttgctctgtctgatggtcgtcgtcatcgtcttgtattttagcctctggaaaggggtgaagacatcaggaaaggtggtgtggatcacagccacgctgccttacttcgtgctgttcgtgctcctggtccatggcgtcacgctgcccggagcctccaatggcatcaatgcctacctgcacatcgacttctaccgcttgaaagaggccacggtatggattgatgccgcaactcagatatttttttccttgggggctggatttggagtattgattgcatttgccagttacaacaaatttgacaacaactgttacagggatgccctgctgaccagcagcatcaactgtatcaccagcttcgtctctgggttcgccatcttctccatccttggttacatggcccatgaacacaaggtcaacattgaggatgtggccacagaaggagctggcctagtgttcatcctgtatccagaggccatttctaccctgtctggatctacattctgggctgttgtgtttttcgtcatgctcctggcgctgggccttgacagctcaatgggaggcatggaggctgtcatcacgggcctggcagatgacttccaggtcctgaagcgacaccggaaactcttcacatttggcgtcaccttcagcactttccttctcgccctgttctgcataaccaagggtggaatttacgtcttgaccctcctggacacctttgctgcgggcacctccatcctttttgctgtcctcatggaagccatcggagtttcctggttttatggagtggacaggttcagcaacgacatccagcagatgatggggttcaggccgggtctatactggagactgtgctggaagttcgtcagtcctgccttcctcctgttcgtggttgtggtcagcatcatcaacttcaagccactcacctacgacgactacatcttcccgccctgggccaactgggtggggtggggcatcgccctgtcctccatggtcctggtgcccatctacgtcatctataagttcctcagcacgcagggctctctttgggagagactggcctatggcatcacgccagagaacgagcaccacctggtggctcagagggacatcagacagttccagttgcaacactggctggccatctgagatgggtaattaattaatttttatcgatctaattcaacaatgtctggagagctcggatccttctgtgagcgtatggcaaacgaaggaaaaatagttatagtagccgcactcgatgggacatttcaacgtaaaccgtttaataatattttgaatcttattccattatctgaaatggtggtaaaactaactgctgtgtgtatgaaatgctttaaggaggcttccttttctaaacgattgggtgaggaaaccgagatagagataataggaggtaatgatatgtatcaatcggtgtgtagaaagtgttacgtcggctcataatattatattttttatctaaaaaactaaaaataaacattgattaaattttaatataatacttaaaaatggatgttgtgtcgttagataaaccgtttatgtattttgaggaaattgataatgagttagattacgaaccagaaagtgcaaatgaggtcgcaaaaaaactgccgtatcaaggacagttaaaactattactaggagaattattttttcttagtaagttacagcgacacggtatattagatggtgccaccgtagtgtatataggatctgctcccggtacacatatacgttatttgagagatcatttctataatttaggagtgatcatcaaatggatgctaattgacggccgccatcatgatcctattttaaatggattgcgtgatgtgactctagtgactcggttcgttgatgaggaatatctacgatccatcaaaaaacaactgcatccttctaagattattttaatttctgatgtgagatccaaacgaggaggaaatgaacctagtacggcggatttactaagtaattacgctctacaaaatgtcatgattagtattttaaaccccgtggcgtctagtcttaaatggagatgcccgtttccagatcaatggatcaaggacttttatatcccacacggtaataaaatgttacaaccttttgctccttcatattcagctgaaatgagattattaagtatttataccggtgagaacatgagactgactcgagttaccaaattagacgctgtaaattatgaaaaaaagatgtactaccttaataagatcgtccgtaacaaagtagttgttaactttgattatcctaatcaggaatatgactattttcacatgtactttatgctgaggaccgtgtactgcaataaaacatttcctactactaaagcaaaggtactatttctacaacaatctatatttcgtttcttaaatattccaacaacatcaactgaaaaagttagtcatgaaccaatacaacgtaaaatatctagcaaaaattctatgtctaaaaacagaaatagcaagagatccgtacgcggtaataaatagaaacgtactactgagatatactaccgatatagagtataatgatttagttactttaataaccgttagacataaaattgattctatgaaaactgtgtttcaggtatttaacgaatcatccataaattatactccggttgatgatgattatggagaaccaatcattataacatcgtatcttcaaaaaggtcataacaagtttcctgtaaattttctatacatagatgtggtaatatctgacttatttcctagctttgttagactagatactacagaaactaatatagttaatagtgtactacaaacaggcgatggtaaaaagactcttcgtcttcccaaaatgttagagacggaaatagttgtcaagattctctatcgccctaatataccattaaaaattgttagatttttccgcaataacatggtaactggagtagagatagccgatagatctgttatttcagtcgctgattaatcaattagtagagatgagataagaacattataataatcaataatatatcttatatcttatatcttatatcttatatcttgtttagaaaaatgctaatattaaaatagctaacgctagtaatccaatcggaagccatttgatatctataatagggtatctaatttcctgatttaaatagcggacagctatattctcggtagctactcgtttggaatcacaaacattatttacatctaatttactatctgtaatggaaacgtttcccaatgaaatggtacaatccgatacattgcattttgttatatttttttttaaagaggctggtaacaacgcatcgcttcgtttacatggctcgtaccaacaataatagggtaatcttgtatctattcctatccgtactatgcttttatcaggataaatacatttacatcgtatatcgtctttgttagcatcacagaatgcataaatttgttcgtccgtcatgataaaaatttaaagtgtaaatataactattatttttatagttgtaataaaaagggaaatttgattgtatactttcggttctttaaaagaaactgacttgataaaaatggctgtaatctctaaggttacgtatagtctatatgatcaaaaagagattaatgctacagatattatcattagtcatgttaaaaatgacgacgatatcggtaccgttaaagatggtagactaggtgctatggatggggcattatgtaagacttgtgggaaaacggaattggaatgtttcggtcactggggtaaagtaagtatttataaaactcatatagttaagcctgaatttatttcagaaattattcgtttactgaatcatatatgtattcactgcggattattgcgttcacgagaaccgtattccgacgatattaacctaaaagagttatcgggacacgctcttaggagattaaaggataaaatattatccaagaaaaagtcatgttggaacagtgaatgtatgcaaccgtatcaaaaaattactttttcaaagaaaaaggtttgtttcgtcaacaagttggatgatattaacgttcctaattctctcatctatcaaaagttaatttctattcatgaaaagttttggccattattagaaattcatcaatatccagctaacttattttatacagactactttcccatccctccgttgattattagaccggctattagtttttggatagatagtatacccaaagagaccaatgaattaacttacttattaggtatgatcgttaagaattgtaacttgaatgctgatgaacaggttatccagaaggcggtaatagaatacgatgatattaaaattatttctaataacactaccagtatcaatttatcatatattacatccggcaaaaataatatgattagaagttatatcgtcgcccgacgaaaagatcagaccgctagatctgtaattggtcccagtacatctatcaccgttaatgaggtaggaatgcccgcatatattagaaatacacttacagaaaagatatttgttaatgcctttacagtggataaagttaaacaactattagcgtcaaaccaagttaaattttactttaataaacgattaaaccaattaacaagaatacgccaaggaaagtttattaaaaataaaatacatttattgcctggtgattgggtagaagtagctgttcaagaatatacaagtattatttttggaagacagccgtctctacatagatacaacgtcatcgcttcatctatcagagctaccgaaggagatactatcaaaatatctcccggaattgccaactctcaaaatgctgatttcgacggggatgaggaatggatgatattagaacaaaatcctaaagctgtaattgaacaaagtattcttatgtatccgacgacgttactcaaacacgatattcatggagcccccgtttatggatctattcaagatgaaatcgtagcagcgtattcattgtttaggatacaagatctttgtttagatgaagtattgaacatcttggggaaatatggaagagagttcgatcctaaaggtaaatgtaaattcagcggtaaagatatctatacttacttgataggtgaaaagattaattatccgggtctcttaaaggatggtgaaattattgcaaacgacgtagatagtaattttgttgtggctatgaggcatctgtcattggctggactcttatccgatcataagtcgaacgtggaaggtatcaactttattatcaagtcatcttatgtttttaagagatatctatctatttacggttttggggtgacattcaaagatctgagaccaaattcgacgttcactaataaattggaggccatcaacgtagaaaaaatagaacttatcaaagaagcatacgccaaatatctcaacgatgtaagagacgggaaaatagttccattatctaaagctttagaggcggactatgtggaatccatgttatccaacttgacaaatcttaatatccgagagatagaagaacatatgagacaaacgctgatagatgatccagataataacctcctgaaaatggccaaagcgggttataaagtaaatcccacagaactaatgtatattctaggtacgtatggacaacaaaggattgatggtgaaccagcagagactcgagtattgggtagagttttaccttactatcttccagactctaaggatccagaaggaagaggttacattcttaattctttaacaaaaggattaacgggttctcaatattacttttcgatgctggttgccagatctcaatctactgatatcgtctgtgaaacatcacgtaccggaacactggctagaaaaatcattaaaaagatggaggatatggtggtcgacggatacggacaagtagttataggtaatacgctcatcaagtacgccgccaattataccaaaattctaggctcagtatgtaaacctgtagatcttatctatccagatgagtccatgacttggtatttggaaattagtgctctgtggaataaaataaaacagggattcgtttactctcagaaacagaaacttgcaaagaagacattggcgccgtttaatttcctagtattcgtcaaacccaccactgaggataatgctattaaggttaaggatctgtacgatatgattcataacgtcattgatgatgtgagagagaaatacttctttacggtatctaatatagattttatggagtatatattcttgacgcatcttaatccttctagaattagaattacaaaagaaacggctatcactatctttgaaaagttctatgaaaaactcaattatactctaggtggtggaactcctattggaattatttctgcacaggtattgtctgagaagtttacacaacaagccctgtccagttttcacactactgaaaaaagtggtgccgtcaaacaaaaacttggtttcaacgagtttaataacttgactaatttgagtaagaataagaccgaaattatcactctggtatccgatgatatctctaaacttcaatctgttaagattaatttcgaatttgtatgtttgggagaattaaatccaaacatcactcttcgaaaagaaacagataaatatgtagtagatataatagtcaatagattatacatcaagagagcagaaataaccgaattagtcgtcgaatatatgattgaacgatttatctcctttagcgtcattgtaaaggaatggggtatggagacattcattgaggacgaggataatattagatttactgtctacctaaatttcgttgaaccggaagaattgaatcttagtaagtttatgatggttcttccgggggcagccaacaagggaaagattagtaaattcaagattcctatctctgattatacgggatatgacgacttcaatcaaacaaaaaagctcaataagatgactgtagaactcatgaatctaaaagaattgggttctttcgatttggaaaacgtcaacgtgtatcctggagtatggaatacatacgatatcttcggtatcgaggccgctcgtgaatacttgtgcgaagccatgttaaacacctatggagaagggttcgattatctgtatcagccttgtgatcttctcgctagtttactatgtgctagttacgaaccagaatcagtgaataaattcaagttcggcgcagctagtactcttaagagagctacgttcggagacaataaagcattgttaaacgcggctcttcataaaaagtcagaacctattaacgataatagtagctgccacttttttagcaaggtccctaatataggaactggatattacaaatactttatcgacttgggtcttctcatgagaatggaaaggaaactatctgataagatatcttctcaaaagatcaaggaaatggaagaaacagaagacttttaattcttatcaataacatatttttctatgatctgtcttttaaacgatggattttccacaaatgcgcctctcaagtccctcatagaatgatacacgtataaaaaatatagcataggcaatgactccttatttttagacattagatatgccaaaatcatagccccgcttctatttactcccgcagcacaatgaaccaacacgggctcgtttcgttgatcacatttagataaaaaggcggttacgtcgtcaaaatatttactaatatcggtagttgtatcatctaccaacggtatatgaataatattaatattagagttaggtaatgtatatttatccatcgtcaaatttaaaacatatttgaacttaacttcagatgatggtgcatccatagcatttttataatttcccaaatacacattattggttacccttgtcattatagtgggagatttggctttgtgcatatctccagttgaacgtagtagtaagtatttatacaaacttttcttatccatttataacgtacaaatggataaaactactttatcggtaaacgcgtgtaatttagaatacgttagagaaaaggctatagtaggcgtacaagcagccaaaacatcaacacttatattctttgttattatattggcaattagtgcgctattactctggtttcagacgtctgataatccagtctttaatgaattaacgagatatatgcgaattaaaaatacggttaacgattggaaatcattaacggatagcaaaacaaaattagaaagtgatagaggtagacttctagccgctggtaaggatgatatatttgaattcaaatgtgtggatttcggcgcctattttatagctatgcgattggataagaaaacatatctgccgcaagctattaggcgaggtactggagacgcgtggatggttaaaaaggcggcaaaggtcgatccatctgctcaacaattttgtcagtatttgataaaacacaagtctaataatgttattacttgtggtaatgagatgttaaatgaattaggttatagcggttattttatgtcaccgcattggtgttccgattttagtaatatggaatagtgttagataaatgcggtaacgaatgttcctgtaaggaaccataacagcttagatttaacgttaaagatgagcataaacataataaacaaaattacaatcaaacttataacattaatatcaaacaatccaaaaaatgaaatcagtggagtagtaaacgcgtacataactcctggataacgtttagcagctgccgttcctattctagaccaaaaattcggtttcatgttttcgaaacggtattctgcaacaagtcgaggatcgtgttctacatatttggcggcattatccagtatctgcctattgatcttcatttcgttttcgattctggctatttcaaaataaaatcccgatgatagacctccagactttataatttcatctacgatgttcagcgccgtagtaactctaataatataggctgataagctaacatcataccctcctgtatatgtgaatatggcatgatttttgtccattacaagctcggttttaactttattgcctgtaataatttctctcatctgtaggatatctatttttttgtcatgcattgccttcaagacgggacgaagaaacgtaatatcctcaataacgttatcgttttctacaataactacatattctacctttttattttctaactcggtaaaaaaattagaatcccatagggctaaatgtctagcgatatttcttttcgtttcctctgtacacatagtgttacaaaaccctgaaaagaagtgagtatacttgtcatcatttctaatgtttcctccagtccactgtataaacgcataatccttgtaatgatctggatcatccttgactaccacaacatttcttttttctggcataacttcgttgtcctttacatcatcgaacttctgatcattaatatgctcatgaacattaggaaatgtttctgatggaggtctatcaataactggcacaacaataacaggagttttcaccgccgccatttagttattgaaattaatcatatacaactctttaatacgagttatattttcgtctatccattgtttcacattgacatatttcgacaaaaagatataaaatgcgtattccaatgcttctctgtttaatgaattactaaaatatacaaacacgtcactgtctggcaataaatgatatcttagaatattgtaacaatttattttgtattgcacatgttcgtgatctatgagttcttcttcgaatggcataggatctccgaatctgaaaacgtataaataggagttagaataataatatttgagagtattggtaatatataaactctttagcggtataattagtttttttctctcaatttctatttttagatgtgatggaaaaatgactaattttgtagcattagtatcatgaactctaatcaaaatcttaatatcttcgtcacacgttagctctttgaagtttttaagagatgcatcagttggttctacagatggagtaggtgcaacaattttttgttctacacatgtatgtactggagccattgttttaactataatggtgcttgtatcgaaaaactttaatgcagatagcggaagctcttcgccgcgactttctacgtcgtaattgggttctaacgccgatctctgaatggatactagttttctaagttctaatgtgattctctgaaaatgtaaatccaattcctccggcattatagatgtgtatacatcggtaaataaaactatagtatccaacgatcccttctcgcaaattctagtcttaaccaaaaaatcgtatataaccacggagatggcgtatttaagagtggattcttctaccgttttgttcttggatgtcatataggaaactataaagtccgcactactgttaagaatgattactaacgcaactatatagtttaaattaagcattttggaaacataaaataactctgtagacgatacttgactttcgaataagtttgcagacaaacgaagaaagaacagacctctcttaatttcagaagaaaactttttttcgtattcctgacgtctagagtttatatcaataagaaagttaagaattagtcggttaatgttgtatttcattacccaagtttgagatttcataatattatcaaaagacatgataatattaaagataaagcgctgactatgaacgaaatagctatatggttcgctcaagaatatagtcttgttaaacgtggaaacgataactgtatttttaatcacgtcagcggcatctaaattaaatataggtatatttattccacacactctacaatatgccacaccatcttcataataaataaattcgttagcaaaattattaattttagtgaaatagttagcgtcaactttcatagcttccttcaatctaatttgatgctcacacggtgcgaattccactctaacatcccttttccatgcctcaggttcatcgatctctataatatctagttttttgcgtttcacaaacacaggctcgtctctcgcgatgagatctgtatagtaactatgtaaatgataactagatagaaagatgtagctatatagatgacgatcctttaagagaggtataataactttaccccaatcagatagactgttgttatggtcttcggaaaaagaatttttataaatttttccagtattttccaaatatacgtacttaacatctaaaaaatccttaatgataataggaatggataatccgtctattttataaagaaatacatatcgcacattatacttttttttggaaatgggaataccgatgtgtctacataaatatgcaaagtctaaatattttttagagaatcttagttggtccaaattcttttccaagtacggtaatagatttttcatattgaacggtatcttcttaatctctggttctagttccgcattaaatgatgaaactaagtcactatttttataactaacgattacatcacctctaacatcatcatttaccagaatactgatcttcttttgtcgtaaatacatgtctaatgtgttaaaaaaaagatcatacaagttatacgtcatttcatctgtggtattcttgtcattgaaggataaactcgtactaatctcttctttaacagcctgttcaaatttatatcctatatacgaaaaaatagcaaccagtgtttgatcatccgcgtcaatattctgttctatcgtagtgtataacaatcgtatatcttcttctgtgatagtcgatacgttataaaggttgataacgaaaatatttttatttcgtgaaataaagtcatcgtaggattttggacttatattcgcgtctagtagatatgcttttatttttggaatgatctcaattagaatagtctctttagagtccatttaaagttacaaacaactaggaaattggtttatgatgtataatttttttagtttttatagattctttattctatacttaaaaaatgaaaataaatacaaaggttcttgagggttgtgttaaattgaaagcgagaaataatcataaattatttcattatcgcgatatccgttaagtttgtatcgtaatggcgtggtcaattacgaataaagcggatactagtagcttcacaaagatggctgaaatcagagctcatctaaaaaatagcgctgaaaataaagataaaaacgaggatattttcccggaagatgtaataattccatctactaagcccaaaaccaaacgagccactactcctcgtaaaccagcggctactaaaagatcaaccaaaaaggaggaagtggaagaagaagtagttatagaggaatatcatcaaacaactgaaaaaaattctccatctcctggagtcagcgacattgtagaaagcgtggccgctgtagagctcgatgatagcgacggggatgatgaacctatggtacaagttgaagctggtaaagtaaatcatagtgctagaagcgatctctctgacctaaaggtggctaccgacaatatcgttaaagatcttaagaaaattattactagaatctctgcagtatcgacggttctagaggatgttcaagcagctggtatctctagacaatttacttctatgactaaagctattacaacactatctgatctagtcaccgagggaaaatctaaagttgttcgtaaaaaagttaaaacttgtaagaagtaaatgcgtgcacttttttataaagatggtaaactctttaccgataataattttttaaatcctgtatcagacgataatccagcgtatgaggttttgcaacatgttaaaattcctactcatttaacagatgtagtagtatatgaacaaacgtgggaggaggcgttaactagattaatttttgtgggaagtgattcaaaaggacgtagacaatacttttacggaaaaatgcatgtacagaatcgcaacgctaaaagagatcgtatttttgttagagtatataacgttatgaaacgaattaattgttttataaacaaaaatataaagaaatcgtccacagattccaattatcagttggcggtttttatgttaatggaaactatgttttttattagatttggtaaaatgaaatatcttaaggagaatgaaacagtagggttattaacactaaaaaataaacacatagaaataagtcccgatgaaatagttatcaagtttgtaggaaaggacaaagtttcacatgaatttgttgttcataagtctaatagactatataaaccgctattgaaactgacggatgattctagtcccgaagaatttctgttcaacaaactaagtgaacgaaaggtatacgaatgtatcaaacagtttggtattagaatcaaggatctccgaacgtatggagtcaattatacgtttttatataatttttggacaaatgtaaagtccatatctcctcttccgtcaccaaaaaagttaatagcattaactatcaaacaaactgctgaagtggtaggtcatactccatcaatttcaaaaagagcttatatggcaacgactattttagaaatggtaaaggataaaaattttttagatgtagtatctaaaactacgttcgatgaattcctatctatagtcgtagatcacgttaaatcatctacggatggatgatatagatctttacacaaataattacaagaccgataaatggaaatggataagcgtatgaaatctctcgcaatgacagctttcttcggagagctaagcacattagatattatggcattgataatgtctatatttaaacgccatccaaacaataccattttttcagtggataaggatggtcagtttatgattgatttcgaatacgataattataaggcttctcaatatttggatctgaccctcactccgatatctggagatgaatgcaagactcacgcatcgagtatagccgaacaattggcgtgtgcggatattattaaagaggatattagcgaatatatcaaaactactccccgtcttaaacgatttataaaaaaataccgcaatagatcagatactcgtatcagtcgagatacagaaaagcttaaaatagctctagctaaaggcatagattacgaatatataaaagacgcttgttaataagtaaatgaaaaaaaactagtcgtttataataaaacacgatatggatgccaacgtagtatcattttctactattgcgacgtatatagacgctttagcgaagaatgcttcggaattagaacagaggtctaccgcatacgaaataaataatgaattggaactagtatttattaagccgccattgattactttgacaaatgtagtgaatatctctacgattcaggaatcgtttattcgatttaccgttactaataaggaaggtgttaaaattagaactaagattccattatctaaggtacatggtctagatgtaaaaaatgtacagttagtagatgctatagataacatagtttgggaaaagaaatcattagtgacggaaaatcgtcttcacaaagaatgcttgttgagactatcgacagaggaacgtcatatatttttggattacaagaaatatggatcctctatccgactagaattagtcaatcttattcaagcaaaaacaaaaaactttacgatagactttaagctaaaatattttctaggatccggtgcccagtctaaaagttctttgttgcacgctattaatcatccaaagtcaaggcctaatacatctctggaaatagaattcacacctagagacaatgaaacagttccatatgatgaactaataaaggaattgacgactctctcgcgtcatatatttatggcttctccagagaatgtaattctttctccgcctattaacgcgcctataaaaacctttatgttgcctaaacaagatatagtaggtttggatctggaaaatctatatgccgtaactaagactgacggcattcctataactatcagagttacatcaaacgggttgtattgttattttacacatcttggttatattattagatatcctgttaagagaataatagattccgaagtagtagtctttggtgaggcagttaaggataagaactggaccgtatatctcattaagctaatagagcctgtgaatgcaatcaatgatagactagaagaaagtaagtatgttgaatctaaactagtggatatttgtgatcggatagtattcaagtcaaagaaatacgaaggtccgtttactacaactagtgaagtcgtcgatatgttatctacatatttaccaaagcaaccagaaggtgttattctgttctattcaaagggacctaaatctaacattgattttaaaattaaaaaggaaaatactatagaccaaactgcaaatgtagtatttaggtacatgtccagtgaaccaattatctttggagaatcgtctatctttgtagagtataagaaatttagcaacgataaaggctttcctaaagaatatggttctggtaagattgtgttatataacggcgttaattatctaaataatatctattgtttggaatatattaatacacataatgaagtgggtattaagtccgtggttgtacctattaagtttatagcagaattcttagttaatggagaaatacttaaacctagaattgataaaaccatgaaatatattaactcagaagattattatggaaatcaacataatatcatagtcgaacatttaagagatcaaagcatcaaaataggagatatctttaacgaggataaactatcggatgtgggacatcaatacgccaataatgataaatttagattaaatccagaagttagttattttacgaataaacgaactagaggaccgttgggaattttatcaaactacgtcaagactcttcttatttctatgtattgttccaaaacatttttagacgattccaacaaacgaaaggtattggcgattgattttggaaacggtgctgacctggaaaaatacttttatggagagattgcgttattggtagcgacggatccggatgctgatgctatagctagaggaaatgaaagatacaacaaattaaactctggaattaaaaccaagtactacaaatttgactacattcaggaaactattcgatccgatacatttgtctctagtgtcagagaagtattctattttggaaagtttaatatcatcgactggcagtttgctatccattattcttttcatccgagacattatgctaccgtcatgaataacttatccgaactaactgcttctggaggcaaggtattaatcactaccatggacggagacaaattatcaaaattaacagataaaaagacttttataattcataagaatttacctagtagcgaaaactatatgtctgtagaaaaaatagctgatgatagaatagtggtatataatccatcaacaatgtctactccaatgactgaatacattatcaaaaagaacgatatagtcagagtgtttaacgaatacggatttgttcttgtagataacgttgatttcgctacaattatagaacgaagtaaaaagtttattaatggcgcatctacaatggaagatagaccgtctacaaaaaactttttcgaactaaatagaggagccattaaatgtgaaggtttagatgtcgaagacttacttagttactatgttgtttatgtcttttctaagcggtaaataataatatggtatgggttctgatctcccagttctaaatgcattaaataattccaatagagcgatttttgttcctataggaccttccaactgtggatactctgtattgttaatagatatattaatacttttgtcgggtaacagaggttctacgtcttctaaaaataaaagttttataacatctggcctgttcataaataaaaacttggcgattctatatatactcttattatcaaatctagccattgtcttatagatgtgagctactgtaggtgtaccatttgattttctttctaatactatatatttctctcgaagaagttcttgcacatcatctgggaataaaatactactgttgagtaaatcagttattttttttatatcgatattgatggacatttttatagttaaggataataagtatcccaaagtcgataacgacgataacgaagtatttatacttttaggaaatcacaatgactttatcagattaaaattaacaaaattaaaggagcatgtatttttttctgaatatattgtgactccagatacatatggatctttatgcgtcgaattaaatgggtctagttttcagcacggcggtagatatatagaggtggaggaatttatagatgctggaagacaagttagatggtgttctacatccaatcatatatctaaagatatacccgaagatatgcacactgataaatttgtcatttatgatatttatacgtttgattcgttcaagaataaacgattggtattcgtacaggtacctccgtcgttaggagatgatagtcatttgactaatccgttattgtcaccgtattatcgtaattcagtagccagacaaatggtcaatgatatgatttttaatcaagattcatttttaaaatatttattagaacatctgattagaagccactatagagtttctaaacatataacaatagttagatacaaggataccgaagaattaaatctaacgagaatatgttataatagagataagtttaaggcgtttgtattcgcttggtttaacggcgtttcggaaaatgaaaaggtactagatacgtataaaaaggtatctaatttgatataatgaattcagtgactgtatcacacgcgccatatactattacttatcacgatgattgggaaccagtaatgagtcaattggtagagttttataacgaagtagccagttggctgctacgagacgagacgtcgcctattcctgataagttctttatacagttgaaacaaccgcttagaaataaacgagtatgtgtgtgtggtatagatccgtatccgaaagatggaactggtgtaccgttcgaatcaccaaattttacaaaaaaatcaattaaggagatagcttcatctatatctagattaaccggagtaattgattataaaggttataaccttaatataatagacggggttataccctggaattattacttaagttgtaaattaggagaaacaaaaagtcacgcgatttactgggataagatttccaagttactgctgcagcatataactaaacacgttagtgttctttattgtttgggtaaaacagatttctcgaatatacgggccaagttagaatccccggtaactaccatagtcggatatcatccagcggctagagaccgccaattcgagaaagatagatcatttgaaattatcaacgttttactggaattagacaacaaggcacctataaattgggctcaagggtttatttattaatgctttagtgaaattttaacttgtgttctaaatggatgcggctattagaggtaatgatgttatctttgttcttaagactataggtgtcccgtcagcgtgcagacaaaatgaagatccaagatttgtagaagcatttaaatgcgacgagttagaaagatatattgagaataatccagaatgtacactattcgaaagtcttagggatgaggaagcatactctatagtcagaattttcatggatgtagatttagacgcgtgtctagacgaaatagattatttaacggccattcaagattttattatcgaggtgtcaaactgtgtagctagattcgcgtttacagaatgcggcgccattcatgaaaatgtaataaaatccatgagatctaatttttcattgactaagtctacaaatagagataaaacaagttttcatattatctttttagatacgtataccactatggatacattgatagctatgaaacgaacactattagaattaagtagatcatctgaaaatccactaaccagatcgatagacactgccgtatataggagaaaaacaactcttcgggttgtaggtactaggaaaaatccaaattgcgacactattcatgtaatgcaaccaccgcatgataatatagaagattacctattcacttacgtggatatgaacaacaatagttattacttttctctacaacaacgattggaggatttagttcctgataagttatgggaaccagggtttatttcattcgaagacgctataaaaagagtttcaaaaatattcattaattctataataaactttaatgatctcgatgaaaataattttacaacggtaccactggtcatagattacgtaacaccttgtgcattatgtaaaaaacgatcgcataaacatccgcatcaactatcgttggaaaatggtgctattagaatttacaaaactggtaatccacatagttgtaaagttaaaattgttccgttggatggtaataaactgtttaatattgcacaaagaattttagacactaactctgttttattaaccgaacgaggagaccatatagtttggattaataattcatggaaatttaacagcgaagaacccttgataacaaaactaattttgtcaataagacatcaactacctaaggaatattcaagcgaattactctgtccaagaaaacgaaagactgtagaagctaacatacgagacatgttagtagattcagtggagaccgatacctatccggataaacttccgtttaaaaatggtgtattggacctggtagacggaatgttttactctggagatgatgctaaaaaatatacgtgtactgtatcaaccggatttaaatttgacgatacaaagttcgtcgaagacagtccagaaatggaagagttaatgaatatcattaacgatatccaaccattaacggatgaaaataagaaaaatagagagctatatgaaaaaacattatctagttgtttatgcggtgctaccaaaggatgtttaacattcttttttggagaaactgcaactggaaagtcgacaaccaaacgtttgttaaagtctgctatcggtgacctgtttgttgagacgggtcaaacaattttaacagatgtattggataaaggacctaatccatttatcgctaacatgcatttgaaaagatctgtattctgtagcgaactacctgattttgcctgtagtggatcaaagaaaattagatctgacaatattaaaaagttgacagaaccttgtgtcattggaagaccgtgtttctccaataaaattaataatagaaaccatgcgacaatcattatcgatactaattacaaacctgtttttgataggatagataacgcattaatgagaagaattgccgtcgtgcgattcagaacacacttttctcaaccttctggtagagaggctgctgaaaataatgacgcgtacgataaagtcaaactattagacgaggggttagatggtaaaatacaaaataatatatatagatttgcatttctatacttgttggtgaaatggtacaaaaaatatcatgttcctattatgaaactatatcctacacccgaagagattcctgactttgcattctatctcaaaataggtactctgttggtatctagctctgtaaagcatattccattaatgacggacctctccaaaaagggatatatattgtacgataatgtggtcactcttccgttgactactttccaacagaaaatatccaagtattttaattctagactatttggacacgatatagagagcttcatcaatagacataagaaatttgccaatgttagtgatgaatatctgcaatatatattcatagaggatatttcatctccgtaaatatatgctcatatatttatagaagatatcacatatctaaatgaataccggaatcatagatttatttgataatcatgttgatagtataccaactatattacctcatcagttagctactctagattatctagttagaactatcatagatgagaacagaagcgtgttattgttccatattatgggatcaggtaaaacaataatcgctttgttgttcgccttggtagcttccagatttaaaaaggtttacattctagtgccgaacatcaacatcttaaaaattttcaattataatatgggtgtagctatgaacttgtttaatgacgaattcatagctgagaatatctttattcattccacaacaagtttttattctcttaattataacgataacgtcattaattataacggattatctcgctacaataactctatttttatcgttgatgaggcacataatatctttgggaataatactggagaacttatgaccgtgataaaaaataaaaacaagattccttttttactattgtctggatctcccattactaacacacctaatactctgggtcatattatagatttaatgtccgaagagacgatagattttggtgaaattattagtcgtggtaagaaagtaattcagacacttcttaacgaacgcggtgtgaatgtacttaaggatttgcttaaaggaagaatatcatattacgaaatgcctgataaagatctaccaacgataagatatcacggacgtaagtttctagatactagagtagtatattgtcacatgtctaaacttcaagagagagattatatgattactagacgacagctatgttatcatgaaatgtttgataaaaatatgtataacgtgtcaatggcagtattgggacaacttaatctgatgaataatttagatactttatttcaggaacaggataaggaattgtacccaaatctgaaaataaataatggcgtgttatacggagaagaattggtaacgttaaacattagttccaaatttaaatactttattaatcggatacagacactcaacggaaaacattttatatacttttctaattctacatatggcggattggtaattaaatatatcatgctcagtaatggatattctgaatataatggttctcagggaactaatccacatatgataaacggcaaaccaaaaacatttgctatcgttactagtaaaatgaaatcgtctttagaggatctattagatgtgtataattctcctgaaaacgatgatggtagtcaattgatgtttttgttttcatcaaacattatgtccgaatcctatactctaaaagaggtaaggcatatttggtttatgactatcccagatactttttctcaatacaaccaaattcttggacgatctattagaaaattctcttacgccgatatttctgaaccagttaatgtatatcttttagccgccgtatattccgatttcaatgacgaagtgacgtcattaaacgattacacacaggatgaattaattaatgttttaccatttgacatcaaaaagctgttgtatctaaaatttaagacgaaagaaacgaatagaatatactctattcttcaagagatgtctgaaacgtattctcttccaccacatccatcaattgtaaaagttttattgggagaattggtcagacaatttttttataataattctcgtattaagtataacgataccaagttacttaaaatggttacatcagttataaaaaataaagaagacgctaggaattacatagatgatattgtaaacggtcacttctttgtatcgaataaagtatttgataaatctcttttatacaaatacgaaaacgatattattacagtaccgtttagactttcctacgaaccatttgtttggggagttaactttcgtaaagaatataacgtggtatcttctccataaaactgatgagatatataaagaaataaatgtcgagctttgttaccaatggatacctttccgttacattggaaccacacgagctgacgttagacataaaaactaatattaggaatgccgtatataagacgtatctccatagagaaattagtggtaaaatggccaagaaaatagaaattcgtgaagacgtggaattacctctcggcgaaatagttaataattctgtagttataaacgttccgtgtgtaataacctacgcgtattatcacgttggggatatagtcagaggaacattaaacatcgaagatgaatcaaatgtaactattcaatgtggagatttaatctgtaaactaagtagagattcgggtactgtatcatttagcgattcaaagtactgcttttttcgaaatggtaatgcgtatgacaatggcagcgaagtcactgccgttctaatggaggctcaacaaggtatcgaatctagttttgtttttctcgcgaatatcgtcgactcataaaaaagagaatagcggtaagtataaacacgaatactatggcaataattgcgaatgttttattctcttcgatatatttttgataatatgaaaaacatgtctctctcaaatcggacaaccatctcataaaatagttctcgcgcgctggagaggtagttgccgctcgtataatctctccagaataatatacttgcgtgtcgtcgttcaatttatacggatttctatagttctctgttatataatgcggtttgccctcatgattagacgacgacaatagtgttctaaatttagatagttgatcagaatgaatgtttattggcgttggaaaaattatccatacagcgtctgcagagtggttgatagttgttcctagatatgtaaaataatccaacttactaggcagcaaattgtctagataaaatactgaatcaaacggtgcagacgtattggcggatctaatggaatccaattgattaactatcttttgaaaatatacatttttatgatccaatacttgtaagaatatagaaataatgataagtccatcatcgtgtttttttgcctcttcataagaactatattttttcttattccaatgaacaagattaatctctccagagtatttgtacacatctatcaagtgattggatccataatcgtcttcctttccccaatatatatgtagtgatgataacacatattcattggggagaaaccctccacttatatatcctcctttaaaattaatccttactagttttccagtgttctggatagtggttggtttcgactcattataatgtatgtctaacggcttcaatcgcgcgttagaaattgcttttttagtttctatattaataggagatagttgttgcggcatagtaaaaatgaaatgataactgtttaaaaatagctcttagtatgggaattacaatggatgaggaagtgatatttgaaactcctagagaattaatatctattaaacgaataaaagatattccaagatcaaaagacacgcatgtgtttgctgcgtgtataacaagtgacggatatccgttaataggagctagaagaacttcattcgcgttccaggcgatattatctcaacaaaattcagattctatctttagagtatccactaaactattacggtttatgtactacaatgaactaagagaaatctttagacggttgagaaaaggttctatcaacaatatcgatcctcactttgaagagttaatattattgggtggtaaactagataaaaaggaatctattaaagattgtttaagaagagaattaaaagaggaaagtgatgaacgtataacagtaaaagaatttggaaatgtaattctaaaacttacaacacgggataaattatttaataaagtatatataagttattgcatggcgtgttttattaatcaatcgttggaggatttatcgcatactagtatttacaatgtagaaattagaaagattaaatcattaaatgattgtattaacgacgataaatacgaatatctgtcttatatttataatatgctagttaatagtaaatgaacttttacagatctagtataattagtcagattattaagtataatagacgactagctaagtctattatttgcgaggatgactctcaaattattacactcacggcattcgttaaccaatgcctatggtgtcataaacgagtatccgtgtccgctattttattaactactgataacaaaatattagtatgtaacagacgagatagttttctctattctgaaataattagaactagaaacatgtttagaaagaaacgattatttctgaattattccaattatttgaacaaacaggaaagaagtatactatcgtcatttttttctctagatccagctactactgataatgatagaatagacgctatttatccgggtggcatacccaaaaggggtgagaatgttccagagtgtttatccagggaaattaaagaagaagttaatatagacaattcttttgtattcatagacactcggttttttattcatggcatcatagaagataccattattaataaattttttgaggtaatcttctttgtcggaagaatatctctaacgagtgatcaaatcattgatacatttaaaagtaatcatgaaatcaaggatctaatatttttagatccgaattcaggtaatggactccaatacgaaattgcaaaatatgctctagatactgcaaaacttaaatgttacggccatagaggatgttattatgaatcattaaaaaaattaactgaggatgattgattaaaaaatataaattaatttaccatcgtgtatttttataacgggattgtccggcatatcatgtagatagttaccgtctacatcgtatactcgaccatctacgcctttaaatcctctatttattgacattaatctattagaattggaataccaaatattagtaccctcaattagtttattggtaatattttttttagacgatagatcgatggctcttgaaaccaaggttttccaaccggactcattgtcgatcggtgagaagtctttttcattagcatgaatccattctaatgatgtatgtttaaacactctaaacaattggacaaattcttttgatttgctttgaatgatttcaaataggtcttcgtctacagtaggcataccattagataatctagccattataaagtgcacgtttacatatctacgttctggaggagtaagaacgtgactattgagacgaatggctcttcctactatctgacgaagagacgcctcgttccatgtcatatctaaaatgaagatatcattaattgagaaaaaactaataccctcgcctccactagaagagaatacgcatgttttaatgcattctccgttagtgtttgattcttggttaaactcagccaccgccttgattctagtatcttttgttctagatgagaactctatattagagataccaaagactttgaaatatagtaataagatttctattcctgactgattaacaaatggttcaaagactagacatttaccatgggatgctaatattcccaaacatacatctataaatttgacgcttttctcttttaattcagtaaatagagagatatcagccgcactagcatcccctttcaatagttctccctttttaaaggtatctaatgcggatttagaaaactctctatctcttaatgaatttttaaaatcattatatagtgttgctatctcttgcgcgtattcgcccggatcacgattttgtctttcaggaaagctatcgaacgtaaacgtagtagccatacgtctcagaattctaaatgatgatatacctgtttttatttcagcgagtttagccttttgataaatttcttcttgctttttcgacatattaacgtatcgcattaatactgttttcttagcgaatgatgcagacccttctacgtcatcaaaaatagaaaactcgttattaactatatacgaacatagtcctcctagtttggagactaattctttttcatcgactagacgtttattctcaaatagcgattggtgttgtaaggatcctggtcgtagtaagttaaccaacatggtgaattcttgcacactattgacgataggtgtagccgataaacaaatcatcttatggttttttaacgcaatggtcttagataaaaaattatatactgaacgagtaggacggatcttaccatcttctttgattaatgatttagaaatgaagttatgacattcatcaataatgacgcatattctactcttggaattaatagttttgatattagtaaaaaatttatttctaaaattttgatcatcgtaattaataaaaatacaatccttcgttatctctggagcgtatctgagtatagtgttcatccaaggatcttctatcaaagcctttttcaccaataagataatagcccaattcgtataaatatccttaagatgtttgagaatatatacagtagtcattgttttaccgacacccgtttcatggaacaataaaagagaatgcatactgtctaatcctaagaaaactcttgctacaaaatgttgataatccttgaggcgtactacgtccgaccccatcatttcaacgggcatattagtagttctgcgtaaggcataatcgatataggccgcgtgtgatttactcatttatgagtgataagtaataactatgttttaaaaatcacagcagtagtttaactagtcttctctgatgtttgttttcgatactttttgaatcagaagtcatactagaataaagcaacgagtgaacgtaatagagagcttcgtatactctattcgaaaactctaagaacttattaatgaattccgtatccactggattgtttaaaatactaaattgaacactgttcacatccttccaagaagaagacttagtgacggacttaacatgagacataaataaatccaaattttttttacaaacatcactagccaccataatggcgctatctttcaaccagctatcgcttacgcattttagcagtctaacatttttaaagagactacaatatattctcatagtatcgattacacctctaccgaataaagttggaagtttaataatacaatatttttcgtttacaaaatcaaataatggtcgaaacacgtcgaaggttaacatcttataatcgctaatgtatagattgttttcagtgagatgattattagatttaatagcatctcgttcacgtttgaacagtttattgcgtgcgctgaggtcggcaactacggcgtccgctttagtactcctcccataatactttacgctattaatctttaaaatttcatagactttatctagatcgctttctggtaacatgatatcatgtgtaaaaagttttaacatgtcggtcggcattctatttagatcattaactctagaaatctgaagaaagtaattagctccgtattccagactaggtaatgggcttttacctagagacagattaagttctggcaatgtttcataaaatggaagaaggacatgcgttccctcccggatattttttacaatttcatccatttacaactctatagtttgttttcattattattagttattatctcccataatcttggtaatacttaccccttgatcgtaagataccttatacaggtcattacatacaactaccaattgtttttgtacataatagattggatggttgacatccatggtggaataaactactcgaacagatagtttatctttccccctagatacattagccgtaatagttgtcggcctaaagaatatctttggtgtaaagttaaaagttagggttcttgttccattattgctttttgtcagtagttcattataaattctcgagatgggtccgttctctgaatatagaacatcatttccaaatctaacttctagtctagaaataatatcggtcttattcttaaaatctattcccttgatgaagggatcgttaatgaacaaatccttggcctttgattcggctgatctattatctccgttatagacgttacgttgactagtccaaagacttacaggaatagatgtatcgatgatgttgatactatgtgatatgtgagcaaagattgttctcttagtggcatcactatatgttccagtaatggcggaaaactttttagaaatgttatatataaaagaattttttcgtgttccaaacattagcagattagtatgaagataaacactcatattatcaggaacattatcaatttttacatacacatcagcatcttgaatagaaacgataccatcttctggaacctctacgatctcggcagactccggataaccagtcggtgggccatcgctaacaataactagatcatccaacaatctactcacatatgcatctatataatctttttcatcttgtgagtaccctggatacgaaataaatttattatccgtatttccataataaggtttagtataaacagagagagatgttgccgcatgaacttcagttacagtcgccgttggttggtttatttgacctattactctcctaggtttctctataaacgatggtttaatttgtacattcttaaccatatatccaataaagctcaattcaggaacataaacaaattctttgttgaacgtttcaaagtcgaacgaagagtcacgaataacgatatcggatactggattgaaggttaccgttacggtaatttttgaatcggatagtttaagactgctgaatgtatcttccacatcaaacggagttttaatataaacgtatactgtagatggttctttaatagtgtcattaggagttaggccaatagaaatatcattaagttcactagaatatccagagtgtttcaaagcaattgtattattgatacaattattatataattcttcgccctcaatttcccaaataacaccgttacacgaagagatagatacgtgattaatacatttatatccaacatatggtacgtaactgaatcttcccatacctttaacttctggaagttccaaactcagaaccaaatgattaagcgcagtaatatactgatccctaatttcgaagctagcgatagcctgattgtctggaccatcgtttgtcataactccggatagagaaatatattgcggcatatacaaagttggaatttgactatcgactgcgaagacattagaccgtttaatagagtcatccccaccgatcaaagaattaatgatagtattattcattttctatttaaaatggaaaaagcttacaataaactccgtagagaaatatctataatttgtgagttttccttaaagtaacagcttccgtaaacgccgtctttatctcttagtaggtttattgtatttatgaccttttccttatcttcatagaatactaaaggcaacaaagaaatttttggttcttctctaagagctacgtgagacttaaccatagaagccaacgaatccctacatattttagaacagaaataccctacttcaccacccttgtatgtctcaatactaataggtctaaaaaccaaatcttgattacaaaaccaacacttatcaattacactatttgtcttaatagacacatctgccatagatttataatactttggtagtatacaagcgagtgcttcttctttagcgggcttaaagactgctttaggtgctgaaataaccacatctggaaggcttactcgcttagccatttaattacggaactatttttttatacttctaatgagcaagtagaaaacctctcatctacaaaaacgtactcgtgtccataatcctctaccatagttacacgttttttagatctcatatgtgctaaaaagttttcccatactaattggttactattatttttcgtataatttttaacagtttgaggttttagatttttagttacagaagtgatatcgaatattttatccaaaaagaatgaataattaattgtcttagaaggagtgttttcttggcaaaagaataccaagtgcttaaatatttctactacttcattaatcttttctgtactcagattcagtttctcatcttttacttgattgattatttcaaagactaacttataatcctttttatttattctctcgttagccttaagaaaactagatacaaaatttgcatctacatcatccgtggatatttgatttttttccatgatatccaagagttccgagataatttctccagaacattgatgagacaataatctccgcaatacatttctcaaatgaataagtttattagacacgtggaagtttgactttttttgtacctttgtacatttttgaaataccgactcgcaaaaaatacaatattcatatccttgttcagatactataccgttatgtctacaaccgctacataatcgtagattcatgttaacactctacgtatctcgtcgtccaatattttatataaaaacattttatttctagacgttgccagaaaatcctgtaatatttttagttttttgggctgtgaataaagtatcgccctaatattgttaccgtcttccgccaatatagtagttaaattatccgcacatgcagaagaacaccgcttaggcggattcagtacaatgttatatttttcgtaccaactcatttaaatatcataatctaaaatagttctgtaatatgtctagcgctaatatattgatcataatcctgtgcataaattaagatacaacaatgtctcgaaatcatcgacatggcttcttccatagttagaagatcgtcgtcaaagttagcaacgtgattcatcaacatttgctgttttgaggcagcaaatactgaaccgtcgccattcaaccattcataaaaaccatcgtctgaatccattgataatttcttgtactggtttttgagagctcgcatcaatctagcatttctagctcccggattgaaaacagaaagaggatcgtacatccagggtccattttctgtaaatagaatcgtataatgtcccttcaagaagatatcagacgatccacaatcaaagaattggtctccgagtttgtaacaaactgcggactttaacctatacatgataccgtttagcataatttctggtgatacgtcaatcggagtatcatctattagagatctaaagccggtgtaacattctccaccaaacatattcttattctgacgtcgttctacataaaacatcattgctccattaacgataacaggggaatgaacagcactacccatcacattagttcccaatggatcaatgtgtgtaactccagaacatcttccatagcctatgttaggaggagcgaacaccactcttccactattgccatcgaatgccatagaataaatatccttggaattgatagaaatcggactgtcggatgttgtgatcatcttcataggattaacaactatgtatggtgccgcctgaagtttcatatcgtaactgatgccgtttataggtctagccacagaaaccaacgtaggtctaaatccaactatagacaaaatagaagccaatatctgttcctcatctgtcataacttgagagcatccagtatgaataatcttcattagatggggatctaccgcatcatcatcgttacaataaaaaattcccattctaatgttcataattgcttttctaatcatggtatgcatgtttgctctctgaatctctgtggaaattagatctgatacacctgtaatcactatcggattatcctccgtaagacgattaaccaacaacatataattataagactttacttttctaaattcataaagttgctggattaggctataggtgtctccatgtacatacgcgttctcgagcgcaggaagtttaataccgaatagtgccatcagaataggatgaatatagtaattagtttctggttttctataaataaaagacaaatcttgtgaactagacatatcggtaaaatgcatggattggaatcgtgtagtcgacagaagaatatgatgattagatggagagtatattttatctaactctttgagttggtcaccgattctaggactagctcgagaatgaataagtactaaaggatgagtacatttcacagaaacactagcattgttcaatgtgctctttacatgggtaaggagttgaaatagctcgtttctatttgttctgacaatatttagtttattcataatgttaagcatatcctgaatagtaaagttagatgtgtcatacttgttagtagttagatatttagcaattgcattcccatcatttctcaatctcgtactccaatcatgcgtggatgctacttcgtcgatggaaaccatacaatcctttttgataggctgttgagattgatcatttcctgcacgtttaggtttggtacgttgatttctagcccctgcggatataaagtcatcgtctacaatttgggacaatgaattgcatacactacaagacaaagatttatcagaagtgtgaatatgatcttcatctaccaaagaaagagtttgattagtataactagattttagtcctgcgttagatgttaaaaaaacatcgctattgaccacggcttccattatttatattcgtagtttttactcgaaagcgtgattttaatatccaatcttattacttttggaatcgttcaaaacctttgactagttgtagaatttgatctattgccctacgcgtatactcccttgcatcatatacgttcgtcaccagatcgtttgtttcggcctgaagttggtgcatatctctttcaacattcgacatgagatccttaagggccatatcgtctagattttgttgagatgctgctcctggatttggattttgttgtgctgttgtacatactgtaccaccagtaggtgtaggagtacatacagtggccacaataggaggttgagaaagtgtaaccgttggagtagtacaagaaatacttccatccgattgttgtgtacatgtagttgttggtaacgtctgagaaggttgggtagatggcggcgtcgtcgttttttgatctttattaaatttagagataatatcctgaacagcattgctcggcgtcaacgctggaaggagtgaactcgccggcgcatcagtatcttcagacagccaatcaaaaagattagacatatcagatgatgtattagtttgttgtcgtggttttggtgtaggagcagtactactaggtagaagaataggagccgatgtagctgttggaaccggctgtggagttatatgaatagttggttgtagcggttggataggctgtctgctggcggccatcatattatctctagctagttgttctcgcaactgtctttgataatacgactcttgagactttagtcctatttcaatcgcttcatcctttttcgtatccggatccttttcttcagaataatagattgacgactttggtgtagaggattctgccagcctctgtgagaacttgttaaagaagtccatttaaggctttaaaattgaattgcgattataagattaaatggcagacacagacgatattatcgactatgaatccgatgatctcaccgaatacgaggatgatgaagaagaggaagaagatggagagtcactagaaactagtgatatagatcccaaatcttcttataagattgtagaatcagcatccactcatatagaagatgcgcattccaatcttaaacatatagggaatcatatatctgctcttaaacgacgctatactagacgtataagtctatttgaaatagcgggtataatagcagaaagctataacttgcttcaacgaggaagattacctctagtttcagaattttctgacgaaacgatgaagcaaaatatgctacatgtaattatacaagagatagaggagggttcttgtcctatagtcatcgaaaagaacggagaattgttgtcggtaaacgattttgacaaagatggtctaaaattccatctagactatattatcaaaatttggaaacttcaaaaacgatattagaatttatacgaatatcgttctctaaatgtcacaatcaagtctcgcatgttcagcaatttattgtcgtactttatatcgtgttcattaacgatatcttgcaaaatagtaatgattctatcttccttcgatagatattcttcagagattattgtcttatattctttcttgttatcagatatgaatttgataagactttgaacattattgatacccgtctgtttaattttttctacagatattttagttttggcagattctatcgtatctgtcaatagacatccaacatcgacattcgacgtcaattgtctataaatcaacgtataaattttagaaataacattagcgaattgttgtgcgttgatgtcgttattctgaaacagtatgattttaggtagcattttcttaacaaagagaacgtatttattgttactcagttgaacagatgatatatccagattactaacgcatctgattccgtataccaaactttcagaagaaatggtatacaattgtttgtattcattcaatgtctctttttcagaaattagtttagagtcgaatactgcaataattttcaagagatagttttcatcagataagattttatttagtgtagatatgataaaactattgttttgttggagaacttgatacgccgcgttctctgtagtcgacgctctcaaatgggaaacaatctccattatttttttggaatcggatactatatcttcggtatcttgacgcagtctagtatacatagagttaagagagattagagtttgtacattaagcaacatgtctctaaatgtggctacaaacttttcctttttcacatcatctagtttattatataccgatttcacaacggcaccagatttaaggaaccagaatgaaaaactctgataactacaatatttcatcatagttacgattttatcatcttctatagttggtgtaatagcgcatacctttttctccaagactggaaccaacgtcataaaaatgtttaaatcaaaatccatatcaacatctgatgcgctaagaccagtctcgcgttcaagattatctttactaatggtgacgaactcatcgtataaaactctaagtttgtccattatttatttacagatttagttgtttaatttatttgtgctcttccagagttgggatagtatttttctaacgtcggtattatattattaggatctacgttcatatgtatcataatattaatcatccacgttttgataaatctatctttagcttctgaaataacgtatttaaacaaaggagaaaaatatttagctacggcatcagacgcaataacattttttgtaaatgtaacgtatttagacgacagatcttcgttaaaaagttttccatctatgtagaatccatcggttgttaacaccattcccgcgtcagattgaataggagtttgaatagtttgttttggaaatagatccttcaataacttatagttgggtgggaaaaaatcgattttatcactagactctttcttttttactatcattacctcatgaactatttcttgaatgagtatatgtattttctttcctatatcggacgcgttcattggaaaatataccatgtcgttaactataagaatatttttatcctcgtttacaaactgaataatatcagatgtagttcgtaaacgaactatatcatcaccagcacaacatctaactatatgatatccactagtttcctttagccgtttattatcttgttccatattagcagtcattccatcatttaagaaggcgtcaaaaataatagggagaaatgacattttggattctgttacaactttaccaaaattaaggatatacggacttactatctttttctcaacgtcaatttgatgaacacacgatgaaaatgtgcttctatgagattgatcatgtagaaaacaacaagggatacaatatttccgcatatcatgaaatatattaagaaatcccaccttattatatttccccaaaggatccatgcacgtaaacattatgccgttatcattaataaagacttctttctcatcggatctgtaaaagttgttactgatttttttcattccaggatctagataattaataatgatgggttttctattcttattctttgtattttggcatatcctagaccagtaaacagtttccactttggtaaaatcagcagacttttgaacgctattaaacatggcattaatggcaataactaaaaatgtaaaatatttttctatgttaggaatatggtttttcactttaatagatatatggtttttggccaaaatgatagatatttttttatccgaggatagtaaaatattattagtcgccgtctctataaaaatgaagctagtctcgatatccaattttattctagaattgataggagtcgccaaatgtaccttatacgttatatctcccttgatgcgttccatttgtgtatctatatcggacacaagatctgtaaatagttttacgttattaatcatcacggtatcgccgtcgctagataacgctaatgtaccatccaagtcccaaatggagagatttaactgttcatcgtttagaataaaatgattaccggtcatattaataaagtgttcatcgtatctagataacaacgacttataattaatgtccaagtcttgaactcgctgaatgatcttttttaacccagttagttttagattggtacgaaatatattgttaaactttgattctacagtaatgtccaaatctagttgtggaaatacttccatcaacattgtttcaaacttgataatattattatctacatcttcgtacgatccaaattccggaatagatgtatcgcacgctctggccacccagataaccaaaaagtcacacgctccaggatatacattgtataaaaagctatcgttttttagtagggtttttttctgcgtgtatacgaagggattaaaaatagtattatcaacgtaactatattccaaattattcttatgagaatagataataatatcgtccttaatatctaacaaatttcctaaatatccctttaattgagtcattcgaagcgtcaatagaatatgtctcttaactatttccggctgttgtatatttaaatgacttcgtaaaaaataatatatgggcgacttctcatctatgtaatcatatggagtgagatatagggctcgttctacctcctgccccttacccacctgtaataccaattgcggacttactatatatcgcatatttatatcgtggggtaaagtgaaaatctactaccgatgatgtaagtcttacaatgttcgaaccagtaccagatcttaatttggaggcctccgtagaactaggggaggtaaatatagatcaaacaacacctatgataaaggagaatagcggttttatatcccgcagtagacgtctattcgcccatagatctaaggatgatgagagaaaactagcactacgattctttttacaaagactttattttttagatcatagagagattcattatttgttcagatgcgttgacgctgtaaaagacgtcactattaccaaaaaaaataacattatcgtggcgccttatatagcacttttaactatcgcatcaaaaggatgcaaacttacagaaacaatgattgaagcattctttccagaactatataatgaacatagtaagaaatttaaattcaactctcaagtatccatcatccaagaaaaactcggataccagtttggaaactatcacgtttatgattttgaaccgtattactctacagtagctctggctattcgagatgaacattcatctggcatttttaatatccgtcaagagagttatctggtaagttcattatctgaaataacatatagattttatctaattaatctaaaatctgatcttgttcaatggagtgctagtacgggcgctgtaattaatcaaatggtaaatactgtattgattacagtgtatgaaaagttacaactggtcatagaaaatgattcacaatttacatgttcattggctgtggaatcaaaacttccaataaaattacttaaagatagaaatgaattatttacaaaattcattaacgagttaaaaaagaccagttcattcaagataagcaaacgcgataaggatacgctactaaaatattttacttaggactggagttagaatttatagacgactcatttcgtttatcattgttactattattactattactatcattattagtgttggcattattagtattcttcttgtcatcttgttcagaaatatacagcaatgctatacctaatactaaatacattatcatgctcgcaatggctctaacaacaacgaaccaaaatgaatttggtcgtagcttttgttcacaaaaatacataaagaaatgtctacataaatctatggcgccattggctacttgaaatagcgccagtcctcctacagattttaatatagctgtataacatgacatttattcatcatcaaaagagacagagtcaccatctgtcatatttagattttttttcatgtgttcaaagtatcctctactcatttcattataatagtttatcatacttagaattttaggacggatcaatgagtaagacttgactagatcgtcagtagtaatttgtgcatcgtctattctgcatccgcttcgtcgaataatgtatagcatcgctttgagattctccatagctatcaagtctttatacaatgacatggaaatatctgtgaatactttatacttctccaacatcgatgccttaacatcatcgcctactttagcattgaaaatacgttctattgtgtagatggatgtagcaagatttttaaacaacaatgccatcttacacgatgattgcctcaagtctccaatcgtttgtttagaacgattagctacagagtccaatgcttggctgactagcatattattatctttagaaattgtattcttcaatgaggcgtttatcatatctgtgatttcgttagtcatattacagtctgactgggttgtaatgttatccaacatatcacctatggatacggtacacgtaccagcatttgtaataatcctatctaagatgttgtatggcattgcgcagaaaatatcttctcctgtaatatctccactctcgataaatctactcagattattcttaaatgccttattctctggagaaaagatatcagtgtccatcatttcattaatagtatacgcagaaaagataccacgagtatcaattctatccaagatacttatcggttccgagtcacagataatggtttcctctccttcgggagatcctgcatagaaatatctaggacaatagtttctatactgtctgtaactctgataatctctaaagtcactaactgataccatgaaattgagaagatcaaacgctgaagtaattaatttttctgcctcgtttttactacaactagttttcatcaatgtagtgacgatgtattgtttagttacttttggtctaatactgatgatagagatattattgcttcccataatggatcttctagtagtcaccttaaagcccattgatgcgaatagcagatagataaagtcttggtatgactcctttctaatatagtacggactacctttgtcacccaactttatacccacataagccataacaacctctttaatagccgtttcatgaggtttatcagccatgagcctgagtagttggaagaatctcatgaatcccgtctcagaaagtcctatatgcatgatagatttatctttcctgggaaactctcgtatagtcatagatgaaatactctttaaagtttctgaaataagattagtaacagtcttacctccgactactctaggtaacaaacaaactctaataggtgttttctctgcggagataatatcagaaaggatagagcaataagtagtattattgtgattataaagaccgaatacataacaggtagaatttataaacatcatgtcctgaaggtttttagacttgtattcctcgtaatccataccgtcccaaaacatggatttggtaactttgatagccgtagatctttgttccttcgccaacaggttaaagaaattaataaagaatttgttgtttctatttatgtccacaaattgcacgtttggaagcgccacggttacattcactgcagcattttgaggatcgcgagtatgaagtacgatgttattgtttactggtatatctggaaagaaatctaccagtctaggaataagagattgatatcgcatagaaatagtaaagtttataatctcatcatcgaagagcattttgttaccattgtaataaatatccactctgtcatatgtataaatgaagtactgttcaaacatgatgagatgtttatatgttggcatagtagtgagatcgacgtttggtaatggcaatgtattaagattaactccataatgtctagcagcatctgcgatgttataagcgtcgtcaaagcggggtcgatcttgtattgttatatattgtctaacacctataagattatcaaaatcttgtctgcttaatacaccgttaacaatttttgccttgaattcttttattggtgcattaataacatccttatagaggatgttaaacaaataagtgttatcaaagttaagatctggatatttcttttctgctagaacatccattgagtcggagccatctggtttaatataaccaccgataaatctagctctgtattctgtatccgtcaatctaatattaagaaggtgttgagtgaaaggtggaagatcgtaaaagctgtgagtattaatgataggattagtttccgaactaatgttaattggggtattaataatatctatatttccagcgttaagtgtaacattaaacagttttaattcacgtgacgtggtatcaattaaataattaatgcccaatttggatatagcagcctgaagctcatcttgtttagttacggatcctaatgagttattaagcaatatatcgaacggatgaacgaaggttgttttaagttggtcacatactttgtaatctagacatagatgcggaagaacggtagaaactatacgaaataaatattcagagtcctctaattgatcaagagtaactattgacttaataggcatcatttatttagtattaaatgacgaccgtaccagtgacggatatacaaaacgatttaattacagagttttcagaagataattatccatctaacaaaaattatgaaataactcttcgtcaaatgtctattctaactcacgttaacaacgtggtagatagagaacataatgccgccgtagtgtcatctccagaggaaatatcctcacaacttaatgaagatctatttccagatgatgattcaccggccactattatcgaacgagtacaacctcatactactattattgacgatactccacctcctacgtttcgtagagagttattaatatcggaacaacgtcaacaacgagaaaaaagatttaatattacagtatcgaaaaatgctgaagcaataatggaatctagatctatgataacttctatgccaacacaaacaccatccttgggagtagtttatgataaagataaaagaattcagatgttagaggatgaagtggttaatcttagaaatcaacgatctaatacaaaatcatctgataatttagataattttaccaaaatactatttggtaagactccgtacaaatcaacagaagttaataagcgtatagccatcgttaattatgcaaatttgaacgggtcccccttatcagtcgaggacttggatgtttgttcggaggatgaaatagatagaatctataaaacgattaaacaatatcacgaaagtagaaaacgaaaaattatcgtcactaacgtgattattattgtcataaacattatcgagcaggcattgctaaaactcggatttgaagaaatcaaaggactgagtaccgatatcacttcagaaattatcgatgtggagatcggagatgactgcgatgctgtagcatctaaactaggaatcggtaacagtccggttcttaatattgtattgtttatactcaagatattcgttaaacgaattaaaattatttaatttaatacattcccatatccagacaacaatcgtctggattaatctgttcctgtcgtctcataccggacgacatattaatctttttattagtgggcatctttttagatggtttctttttcccagcattaactgagtcgatacctagaagatcgtgattgatctctccgaccattccacgaacttctaattggccgtctctgacggtaccataaactattttaccagcattagtaacagcttggacaatctgaccatccatcgcattgtacgatgtagtagtaactgttgttctacgtctaggagcaccagaagtatttttggagcccttggatgttgatgtagaagaagacgaggattttgattttggtttacatgtaatacattttgaactctttgattttgtatcacatgcgccggcagtcacatctgtttgagaattaagattattgttgcctcctttgacggctgcatctccaccgatttgcgctagtagatttttaagctgtggtgtaatcttattaactgtttcgatataatcatcgtaactgcttctaacggctaaattttttttatccgccatttagaagctaaaaatatttttatttatgcagaagatttaactagattatacaatgaactaatatgatccttttccagattatttacaaacttggtattttttggttctggaggaggcgaatttaaattcggacttggattcggattttgtaagttcttgatcttattatacatcgagtataggatggcgacagtaactgctacacaaataccgatcaaaagaagaataccaatcatttattgacaataacttcactattgatcaagtatgcaatatatcatcttttcactaaataagtagtaataatgattcaacaatgtcgagatatatggacgataataatttagttcatggaaatatcgctatgattggtgtgaatgactccgctaactctgtggggtgcgcagtgctttccccacatagaataaattagcattccgactgtgataataataccaagtataaacgccataatactcaatactttccatgtacgagtgggactggtagacttactaaagtcaataaaggcgaagatacacgaaagaatcaaaagaatgattccagcgattagcacgccggaaaaataatttccaatcataagcatcatgtccatttaactaataaaaattttaaatcgccgaatgaacaaagtggaatataaaccatataaaaacaatagtttgtactgcaaaaataatatctatttttgttttcgaagatatggtaaaattaaatagtagtacacagcatgttataactaacagcagcaacggctcgtaattacttatcatttactagacgaaaaggtggtgggatattttcttgctcaaataatacgaatatatcacccatccattttatgcgatgtttatatactctaatctttaatagatctatagacgacgggtttaccaacaatatagattttatcgattcatctaatttaaacccttccttaaacgtgaatgatctattatctggcataacgatgaccctacctgatgaatcggacaatgtactgggccatgtagaataaattatcaacgaattatcgtctacgaacatttatatcatttgttttaattttaggacgcgaataaatggatataaaatagaaaataacagatattacaaccagtgttatggccgcgcccaaccaggtaggcagttttattttatcttttactacaggttctcctggatgtacgtcaccaacggcggacgtagttctagtacaattagacgtaagttccgcttgggaattttttaacgctaaagagttaacgttaatcgtgcacccaacgtatttacatctagttcgttgaacatcttgattataatataaccattttctatctctagattcgtcagtgcactcatgtaaccaacataccctaggtcctaaatatttatctccggaattagattttggataattcgcgcaccaacaatttctatttcctttatgatcgttacaaaagacgtataatgccgtatccccaaaagtaaaataatcaggacgaataattctaataaactcagaacaatatctcgcatccatatgtttggagcaaatatcggaataagtagacatagccggtttccgttttgcacgtaaccattctaaacaattggggtttccaggatcgtttctacaaaatccagtcatgaaatcgtcacaatgttctgtcttgtaattattattaaatatttttggacagtgtttggtatttgtcttagaacaacattttgccacgctatcactatcgcccaggagataatccttttttataaaatgacatcgttgcccggatgctatataatcagtagcgtgttttaaatccttaatatattcaggagttacctcgttctgataatagattaatgatccaggacgaaatttgaaagaactacatggttctccatgaattaatacatattgtttagcaaattcaggaactataaaactactacaatgatctatcgacataccatctatcaaacaaaacttgggtttaatttctcccggagatgtttcataatagtacgtataactttcttctgcaaacttaacagctctattatattcaggataattaaaacctaattccatatatttgtctcgtatatctgctattcctggtgctattttgattctattaagagtaacagctgcccccattcttaataatcgtcagtatttaaactgttaaatgttggtatatcaacatctaccttatttcccgcagtataaggtttgttgcaggtatactgttcaggaatggttacatttatacttcttctatagtcctgtctttcgatgttcatcacatatgcaaagaacagaataaacaaaataatgtaagaaataatattaaatatctgtgaattcgtaaatacattgattgccataataattacagcagctacaatacacacaatagacattcccacagtgttgccattacctccacgatacatttgagttactaagcaataggtaataactaagctagtaagaggcaatagaaaagatgagataaatatcatcaatatagagattagaggagggctatatagagccaagacgaacaaaatcaaaccgagtaacgttctaacatcattatttttgaagattcccaaataatcattcattcctccataatcgttttgcatcatacctccatctttaggcataaacgattgctgctgttcctctgtaaataaatctttatcaagcactccagcacccgcagagaagtcgtcaagcatattgtaatatcttaaataactcatttatatattaaaaaatgtcactattaaagatggagtataatctttatgccgaactaaaaaaaatgacttgtggtcaacccctaagtctttttaacgaagacggggatttcgtagaagttgaaccgggatcatcctttaagtttctgatacctaagggattttacgcctctccttccgtaaagacgagtctagtattcgagacattaacaacgaccgataataaaatcactagtatcaatccaacaaatgcgccaaagttatatcctcttcaacgcaaagtcgtatctgaagtagtttctaatatgaggaaaatgatcgaatcaaaacgtcctctatacatcactcttcacttggcgtgtggatttggtaagactattaccacgtgttatcttatggctacacacggtagaaaaaccgtcatttgcgtacccaataaaatgttaatacatcaatggaagacacaggtagaggcagtcggattggaacataagatatccatagatggagtaagtagtctattaaaggaactaaagactcaaagtccggatgtattaatagtagtcagtagacatctgacaaacgatgccttttgtaaatatatcaataagcattatgatttgttcatcttggatgaatcacatacgtataatctgatgaacaatacagcagttacaagatttttagcgtattatcctccgatgatgtgttattttttaactgctacacctagaccatctaaccgaatttattgtaacagtattattaatattgccaagttatccaatctaaaaaaaactatctatgcagtagatagtttttttgagccatattccacagataatattagacatatggtaaaacgactagatggaccatctaataaatatcatatatataccgagaagttattatctgtagacgagcctagaaatcaacttattcttgataccctggtagaagaattcaagtcaggaactattaatcgcattttagttattactaaactacgtgaacatatggtattattctacaaacgattattagattttttcggaccagaggttgtatttataggagacgcccaaaatagacgtactccagatatggtcaaatcaatcaaggaactaaatagatttatattcgtatccaccttattttattccggtactggtttagatattcctagtttggattcgttgttcatttgctcggcagtaatcaacaatatgcaaatagagcaattactagggagggtatgtcgagaaacagaactattagataggacggtatatgtatttcctaacacatccatcaaagaaataaagtacatgataggaaatttcatgcaacgaattattagtctgtctgtagataaactaggatttaaacaaaaaagttatcggaaacatcaagaatccgatcccacttctgcatgtacaacatcatccagagaagaacgtgtattaaatagaatatttaactcgcaaaatcgttaagaagtttaagcgacgatccgcatgctgcgcaggccagtgtattacccctcatagtattaatataatccaatgatacttttgtgatgtcggaaatcttaaccaatttagactgacaggcagaacacgtcatgcaatcatcatcgtcatcgataactgtagtcttgggcttctttttgcgactcttcattccggaacgcacattggtgctatccatttaggtagtaaaaaataagtcagaatatgccctataacacgatcgtgcaaaacctggtatatcgtctctatctttatcacaatatagtgtatcgacatttttattattattgacctcgtttatcttggaacatggaatgggaacatttttgttatcaacggccatctttgccttaattccagatgttgtaaaattataactaaacagtctatcatcgacacaaatgaaattcttgtttagacgtttgtagtttacgtatgcggctcgttcgcgtctcattttttcagatattgcaggtactataatattaaaaataagaatgaaataacataggattaaaaataaagttatcatgacttctagcgctgatttaactaacttaaaagaattacttagtctgtacaaaagtttgagattttcagattctgcggctatagaaaagtataattctttggtagaatggggaacatctacttactggaaaataggcgtgcaaaaggtagctaatgtcgagacgtcaatatctgattattatgatgaggtaaaaaataaaccgtttaatattgatccgggctattacattttcttaccggtatattttgggagcgtctttatttattcgaagggtaaaaatatggtagaacttggatctggaaactcttttcaaataccagatgatatgcgaagtgcgtgtaacaaagtattagacagcgataacggaatagactttctgagatttgttttgttaaacaatagatggataatggaagatgctatatcaaaatatcagtctccagttaatatatttaaactagctagtgagtacggattaaacatacccaaatatttagaaattgaaatagaggaagacacattatttgacgacgagttatactctattatagaacgctctttcgatgataaatttccaaaaatatccatatcgtatattaagttgggagaacttagacggcaagttgtagactttttcaaattctcattcatgtatattgagtccatcaaggtagatcgtataggagataatatttttattcctagcgttataacaaaatcaggaaaaaagatattagtaaaagatgtagaccatttaatacgatccaaggttagagaacatacatttgtaaaagtaaaaaagaaaaacacattttccattttatacgactatgatggaaacggaacagaaactagaggagaagtaataaaacgaattatagacactataggacgagactattatgttaacggaaagtatttctctaaggttggtagtgcaggcttaaagcaattgactaataaattagatattaatgagtgcgcaactgtcgatgagttagttgatgagattaataaatccggaactgtaaaacgaaaaataaaaaaccaatcagcatttgatttaagcagagaatgtttgggatatccagaagcggattttataacgttagttaataacatgcggttcaaaatagaaaattgtaaggttgtaaatttcaatattgaaaatactaattgtttaaataacccgagtattgaaactatatatggaaactttaaccagttcgtctcaatctttaatgtcgtcaccgatgtcaaaaaaagattattcgagtgaaataatatgcgcctttgatataggtgcaaaaaatcctgccagaactgttttagaagtcaaggataactccgttagggtattggatatatcaaaattagactggagttctgattgggaaaggcgcatagctaaagatttgtcacaatatgaatacactacagttcttctagaacgtcagcctagaaggtcgccgtatgttaaatttatctattttattaaaggctttttatatcatacatcggctgccaaagttatttgcgtctcgcctgtcatgtctggtaattcatatagagatcgaaaaaagagatcggtcgaagcatttcttgattggatggacacattcggattgcgagactccgttccggatagacgcaaattagacgatgtagcggatagtttcaatttggctatgagatacgtattagataaatggaatactaattatacaccttataataggtgtaaatctagaaattacataaaaaaaatgtaataacgttagtaacgccattatggataatctatttacctttctacatgaaatagaagatagatatgccagaactatttttaactttcatctaataagttgcgatgaaataggagatatatatggtcttatgaaagaacgcatttcctcagaggatatgtttgataatatagtgtataataaagatatacatcctgccattaagaaactagtgtattgcgacatccaacttactaaacacattattaatcagaatacgtatccggtatttaacgattcttcacaagtgaaatgttgtcattatttcgacataaactcagataatagcaatattagctctcgtacagtagagatatttgagagggaaaagtcatctcttgtatcatatattaaaactaccaataagaagagaaaggtcaattacggcgaaataaagaaaactgttcatggaggcactaatgcaaattacttttccggtaaaaagtctgacgagtatctgagtactacagttagatccaacattaatcaaccttggatcaaaaccatctctaagaggatgagagttgatatcattaatcactctatagtaacgcgtggaaaaagctctatattacaaactatagaaattatttttactaatagaacatgtgtgaaaatattcaaggattctactatgcacattattctatccaaggacaaggatgaaaaggggtgtatacacatgattgacaaattattctatgtctattataatttatttctgttgttcgaagatatcatccaaaacgagtactttaaagaagtagctaatgttgtaaaccacgtactcacggctacggcattagatgagaaattattcctaattaagaaaatggctgaacacgatgtttatggagttagcaatttcaaaatagggatgtttaacctgacatttattaagtcgttggatcataccgttttcccctctctgttagatgaggatagcaaaataaagttttttaaggggaaaaagctcaatattgtagcattacgatctctggaggattgtataaattacgtgactaaatccgagaatatgatagaaatgatgaaggaaagatcgactattttaaatagcatagatatagaaacggaatcggtagatcgtctaaaagaattgcttctaaaatgaaaaaaaacactaattcagaaatggatcaacgactagggtataagtttttggtgcctgatcctaaagccggagttttttatagaccgttacatttccaatatgtatcgtattctaattttatattgcatcgattgcatgaaatcttgaccgtcaagcggccactcttatcgtttaagaataatacagaacgaattatgatagaaattagcaatgttaaagtgactcctccagattactcacctataatcgcgagtattaaaggtaagagttatgacgcattagccacgttcactgtaaatatctttaaagaggtaatgaccaaagagggtatatccatcactaaaataagtagttatgagggaaaagattctcatttgataaaaattccgctactaataggatacgggaataaaaatccacttgatacagccaagtatcttgttcctaatgtcataggtggagtctttatcaataaacaatctgtcgaaaaagtaggaattaatctagtagaaaagattacaacatggccaaaatttagggttgttaagccaaactcattcactttctcgttttcctccgtatcccctcctaatgtattaccgacaagatatcgccattacaagatatctctggatatatcacaattggaagcgttgaatatatcatcgacaaagacatttataacggtcaatattgttttgctgtctcaatatttatctagagtgagtctagaattcattagacgtagtttatcatacgatatgcctccagaagttgtctatctagtaaacgcgataatagatagtgctaaacgaattactgaatctattactgactttaatattgatacatacattaatgacctggtggaagctgaacacattaaacaaaaatctcagttaacgatcaacgagttcaaatatgaaatgctgcataactttttacctcatatgaactatacacccgatcaactaaagggattttatatgatatctttactaagaaagtttctctactgtatcttccacacttctagatatccagatagagattcgatggtttgtcatcgcatcctaacgtacggcaaatattttgagacgttggcacatgatgaattagagaattacataggcaacatccgaaacgatatcatgaacaatcacaagaacagaggcacttacgcggtaaacattcatgtactaacaactcccggacttaatcacgcgttttctagcttattgagtggaaagttcaaaaagtcagacggtagttatcgaacacatcctcactattcatggatgcagaatatttctattcctaggagtgttggattttatccggatcaagtaaagatttcaaagatgttttctgtcagaaaataccatccaagtcaatatctttacttttgttcatcagacgttccggaaagaggtcctcaggtaggtttagtatctcaattgtctgtcttgagttccattacaaatatactaacgtctgagtatttggatttggaaaagaaaatttgtgagtatatcagatcatattataaagatgatataagttactttgaaacaggatttccaatcactatagaaaatgctctagtcgcatctcttaatccaaatatgatatgtgattttgtaactgactttagacgtagaaaacggatgggattcttcggtaacttggaggtaggtattactttagttagggatcacatgaatgaaattcgcattaatattggagcgggaagattagtcagaccattcttggttgtggataacggagagctcatgatggatgtgtgtccggagttagaaagcagattagacgacatgacattctctgacattcagaaagagtttccgcatgtcatcgaaatggtagatatagaacaatttacttttagtaacgtatgtgaatcggttcaaaaatttagaatgatgtcaaaggatgaaagaaagcaatacgatttatgtgactttcctgccgaatttagagatggatatgtagcatcttcattagtgggaatcaatcacaattctggacccagagctattcttggatgtgctcaagctaaacaagctatctcttgtctgagctcggatatacgaaataaaatagacaatggaattcatttgatgtatccagagaggccaatcgtgattagtaaggctttagaaacttcaaagattgcggctaattgcttcggccaacatgttactatagcattaatgtcgtacaaaggtatcaatcaagaggatggaattatcatcaaaaaacaatttattcagagaggcggtctcgatattgttacagccaagaaacatcaagtagaaattccattggaaaactttaataacaaagaaagagataggtctaacgcctattcaaaattagaaagtaatggattagttagactgaatgctttcttggaatccggagacgctatggcacgaaatatctcatcaagaactcttgaagatgattttgctagagataatcagattagcttcgatgtttccgagaaatataccgatatgtacaaatctcgcgttgaacgagtacaagtagaacttactgacaaagttaaggtacgagtattaaccatgaaagaaagaagacccattctaggagacaaatttaccactagaacgagtcaaaagggaacagtcgcgtatgtcgcggatgaaacggaacttccatacgacgaaaatggtatcacaccagatgtcattattaattctacatccatcttctctagaaaaactatatctatgttgatagaagttattttaacagccgcatattctgctaagccgtacaacaataagggagaaaaccgacctgtctgttttcctagtagtaacgaaacatccatcgatacatatatgcaattcgctaaacaatgttatgagcattcaaatccgaaattgtccgatgaagaattatcggataaaatcttttgtgaaaagattctctatgatcctgaaacggataagccttatgcatccaaagtattttttggaccaatttattacttgcgtctgaggcatttaactcaggacaaggcaaccgttagatgtagaggtaaaaagacgaagctcattagacaggcgaatgagggacgaaaacgtggaggaggtatcaagttcggagaaatggagagagactgtttaatagcgcatggtgcagccaatactattacagaagttttgaaagattcggaagaagattatcaagatgtgtatgtttgtgaaaattgtggagacatagcagcacaaatcaagggtattaatacatgtcttagatgttcaaaacttaatctctctcctctcttaacaaaaattgataccacgcacgtatctaaagtatttcttactcaaatgaacgccagaggcgtaaaagtcaaattagatttcgaacgaaggcctccttcgttttataaaccattagataaagttgatctcaagccgtcttttctggtgtaatattctagtttggtagtagatacatatcaatatcatcaaattcgagatccgaattataaaatgggcgtggattgttaactatagaatcggacgtctgatattcgaaaatctgtggagtttcaggttttggtggaggtgtaactgctacttgggatactgaagtctgatattcagaaagctgtggatgttctggttcggcatccaccgatggtgtcacatcactaatcggttcggtaacgtctgtggatggaggtgctacttctacagaacctgtagcctcagttgtcaacggagatacatttttaatgcgagaaaatgtataatttggtaatggtttcttatgtggatctgaagaagaggtaagatatctactagaaagataccgatcacgttctagttctcttttgtagaacttaactttttctttctccgcatctagttgatattccaacctcttcacgttactacgttcagattccaattcacgttcgcatgggttacctccgcagtttttacgagcgatttcacgttcagccttcatgcgtctctccctctctctatcgagtttatcagagcagtctttctgaaggcgatcgaactccataaatttctccaacgctttgattgtttccatagatttccgaagttcagcttttaggactgtgattctttttctttcgaattcacagctggatgtacaaccgtttccattaccgccatctctaagtttcttttctagatcggcaacatttcatccccatgccttttacattcctcgagtctactgtcgtcgaaatatcgttccagctccttttcgacatcaataactttagcacgttgtctctcaagctctcttttgtagttatctgattccctggcacgtttaagatcttcatgcaattgagtcagctcttaacttcctctcttgcttcttcgtcatagtacgcgcaatcactgtgagatccattgttaccacgtctacactcggcgagctcgcgtttaagagattcaatttcccgtttgtattggtccatgtttccattgctaccaccattagatttacaggctgctagttgtcgttcgagatcagaaatacgggttttcttggaattgatttcgtcgatgtacttggcatcgaaacacttattaagttctttttccaattctacgattttatttctttcgcgagtcaattccctcctgtagtaactatctgttttgtcagattcacgctctctacgtagactttcttgcaagttactaatttgttccctagcacgtccgagtttagttttatatgctgaatagagttctgattcatcctttgagcagatctctagcgatcgtttaagattcctaattctagtctttagcctatttacctcctcagaagatgttccgttaccgttgcgtttacactcgttaagctgtctatcaagatccatgattctatctctaagacgttgcatctctctttccatatcagcattgctttcattattacgtctgcagtcactcaactgtctttcaatatctgagattctatctctaagacgtcgcatctctctctgtttcggcattggtttcattattacgtttacagtcgttcaactgtctttcaagatctgatattctagattggagtctgctaatctctgtagcattttcacggcattcactcagttgtctttcaagatctgaaattttagattggagtctgctaatctctgtaagatttcctcctccgctctcgatgcagtcggtcaacttattctctagttctctaatacgcgaacgcagtgcatcaacttcttgcgtgtcttcctggttgcgtgtacattcatcgagatctctaacgcgtcgtcgttcttcctcaagttctctgcgtactacagaaagcgtgtccctatcttgttgatatttagcaatttctgattctagagtactgattttgcttacgtagttactaatagttgtcttggccttatcaagatcctccttgtatttgtcgcattccttgatatccctacgaagtctggacagttcccattcgacattacgacgtttatcgatttcagctcggagatcgtcatcgcgttgttttagccacatacgactgagttcaagttctcgttgacaagatccatctacttttccattcctaatagtatccagttccttttctagttctgaacgcatttctcgttccctatcaagcgattctctcaattctcggatagtcttcttatcaatttctaataaatctgaaccatcatctgtcccattttgaatatccctgtgttctttgatctcttttgtaagtcggtcgattctttcggttttataaacagaatccctttccaaagtcctaatcttactgagtttatcactaagttctgcattcaattcggtgagttttctcttggcttcttccaactctgttttaaactctccactatttccgcattcttcctcgcatttatctaaccattcaattagtttattaataactagttggtaatcagcgattcctatagccgttcttgtaattgtgggaacataattaggatcttctaatggattgtatggcttgatagcatcatctttatcattattagggggatggacaaccttaattggttggtcctcatctcctccagtagcgtgtggttcttcaataccagtgttagtaataggcttaggcaaatgcttgtcgtacgcgggcacttcctcatccatcaagtatttataatcgggttctacttcagaatattcttttctaagagacgcgacttcgggagttagtagaagaactctgtttctgtatctatcaacgctggaatcaatactcaagttaaggatagcgaatacctcatcgtcatcatccgtatcttctgaaacaccatcatatgacatttcatgaagtctaacgtattgataaatagaatcagatttagtattaaacagatccttaacctttttagtaaacgcatatgtatattttagatctccagatttcataatatgatcacatgccttaaatgtcagtgcttccatgatataatctggaacactaatgggtgacgaaaaagatacagcaccatatgctacgttgataaataaatctgaaccactaagtagataatgattaatgttaagaaagaggaaatattcagtgtataggtatgtcttggcgtcatatcttgtactaaacacgctaaacagtttgttaatgtgatcaatttccaatagattaattagagcagcgggaataccaacaaacatattaccacatccgtattttctatgaatatcacatatcatgttaaaaaatcttgatagaagagcgaatatctcgtctgacttaatgagtcgtagttcagcagcaacataagtcataactgtaaatagaacatactttcctgtagtgttgattctagactccacatcaacaccattattaaaaatagttttatatacatctttaatctgctctccgttaatcgtcgaacgttctagtatacggaaacactttgatttcttatctgtagttaatgacttagtgatatcacgaagaatattacgaattacatttcttgtttttcttgagagacctgattcagaactcaactcatcgttccatagtttttctacctcagtggcgaaatctttggagtgcttggtacatttttcaataaggttcgtgacctccatttattataaaaaatttattcaaaacttaactacaatcgggtaattataagatcgtagatctcccatgtggcggaatactaccatctatcgcatgtggatggacagtaggtaatggccatgggaacagtaatgtttgcatatttatctttcttgctagtattactgcatattgtcccaatgtttcgatgtgatgttctaacctatcaactgccgctgtatcacaacaatagtgtccgatgaaattaagattatgatccaatgtgtttaatatatgattatcaagtcttatacgatccgcgtcttttttgacaggatcaggttcttctacaggaagaagtttcggcctcttatgatattcatgtctgggaaacggtggtctagggtgaggctccggtatcggagtgggttttggattataatcatcatcgtctatgacatcatcttcgacttcgatatttattttgctatcttgatgatgtcctgtatcagttgcattttcagcactcgactgaatattagcgcattcattgtctattattaccatatttctaaacccaaaatgtatgtgttgaacatcagtactatcgttgatgagtcttatagcatgaattcgcttatcgttatcgggtttatcttctgtcaccttagcaattccttttttattaaactctacataatcatatccatttctattgtttgttctaatataaacgagtatagcatcattgctaaatttttcaatagtatcaaaaacagaatatcctaaaccatataatatatattcaggaacactcaaactaaatgtccaggattctcctaaatacgtaaactttaatagtgcgaaatcattcaaaaatctaccacttatagatagatagtacataaatgcgtatagtagtctacctatctctttattatgaaaaccggcattacgatcatatatgtcgtgatatacctgtgatccgtttacgttaaaccataaatacatgggtgatcctataaacatgaatttatttctaattctcagagctatagttaattgaccgtgtaatatttgcttacatgcatacttgatacgcttattaataagatttttatcattgctcgttatttcagaatcgtatatataaggagtaccatcgtgattcttaccagatattatacaaaatactatatataaaatatattgacccacgttagtaatcatataaatgtttaacgttttaaattttgtattcaatgatccattatcatacgctatcatggtcttgtaatattcattctttaaaatataatattgtgttagccattgcattggagctcctaatggagattttctattctcatccattttaggataggctttcataaagtccctaataacttcgtgaataatgtttctatgttttctactgatgcatgtatttgcttcgatttttttatcccatgtttcatctatcatagatttaaacgcagtaatgctcgcaacattaacatcttgaaccgttggtacaattccgttccataaatttataatgttcgccatttatataactcattttttgaatatacttttaattaacaaaagagttaagttactcatatggacgccgtccagtctgaacatcaatctttttagccagagatatcatagccgctcttagagtttcagcgtgattttccaacctaaatagaacttcatcgttgcgtttacaacacttttctatttgttcaaactttgttgttacattagtaatctttttttccaaattagttagccgttgtttgagagtttcctcattgtcgtcttcatcggctttaacaattgcttcgcgtttagcctctggctttttagcagcctttgtagaaaaaaattcagttgctggaattgcaagatcgtcatctccggggaaaagagttccgtccatttaaagtacagattttagaaactgacactctgcgttatttatatttggtacaacacatggattataaatattgatgttaataacatcagaaaatgtaaagtctatacattgttgcatcgtgttaaattttctaatggatctagtattattgggtccaacttctgcctgaaatccaaatatggaagcggatacaaaaccgtttcctggataaaccacacatctccacttttgctttacatcagaaattgtgtcgttgacatcttgaactctcctatctaatgccggtgttccacctatagattttgaatattcgaatgctgcatgagtagcattaaattccttaatattgccataattttcatatattgagtaaccctggataaaaagtaaacacaccgcagccgtcgctaccacaataaaaaaaattgatagagagttcatttataatctattagaagctgacaaaatttttttacacgcatcagacaatgctttaataaatagttcaacatctacttttgtcatatcgaaccgatggtatgattctaacctagaattacatccgaaaaagttgactatgttcatagtcattaagtcattaacaaacaacattccagactctggattataagacgatactgtttcgtcacaattacctaccttaatcatgtgattatgaatattggctattagagcaccttctaagaaatctataatatctttgaaacacgatttaaaatcaaaccacgaatatacttctacgaagaaagttagtttacccataggagaaataactataaatggagatctaaatacaaaatccggatctatgatagttttaacattattatattctctattaaatacctccacatctaaaaatgttaattttgaaactatgtcttcgtttattaccgtacctgaactaaacgctataagctctattgtttgagaactctttaaacgatattcttgaaatacatgtaacaaagtttcctttaactcggtcggtttatctaccatagttacagaatttgtatccttatctataatataataatcaaaatcgtataaagttatataattatcgcgttcagattgtgatcttttcaaatagactaaaaaccccatttctctagtaagtatcttatgtatatgtttgtaaaatatcttcatggtgggaatatgctctaccgcagttagccattcctcattgacagcggtagatgtattagacaaaactattccaatgtttaacaagggccattttacgagattattaaatccttgtttgataaatgtagccaatgagggttcgagttcaacgacgattgaattctcttcccgcggatgctgcatgatgaacgacgggatgttgttcgattgatttggaattctttttcgactttttgtttatattaaatattttaaaatttatagcggatagcaattcatgtaccacggataatgtagacgcgtattgcgcatcgatatctttattattagataaatttatcaataaatgtgagaagtttgcctcgttaaggtcttccatttaaatattatataaacatttgtgtttgtatcttattcgtcttttatggaatagttttttactagtaaagctgcaattacacactttgtccgtaaaacataaatataaacaccagcttttatcaatcgttccaaaaagtcgacggcggacatttttaacatggcatctattttaaatacacttaggtttttggaaaaaacatcattttataattgtaacgattcaataactaaagaaaagattaagattaaacataagggaatgtcatttgtattttataagccaaagcattctaccgttgttaaatacttgtctggaggaggtatatatcatgatgatttggttgtattggggaaggtaacaattaataatctaaagatgatgctattttacatggatttatcatatcatggagtgacaagtagtggagcaatttacaaattgggatcgtctatcgatagactttctctaaataggactattgttacaaaagttaataattatgatgatacattttttgacgacgatgattgatcgctattgcacaattttgtttttgtactttctaatatagtgtttaggttctttttcatatgagaatattgatttactaaaatatctatgtttaacttttgttctatgacgtccttatcggcggtatcggtacatatacgtaattcaccttcacaaaatacggagtcttcgataataatagccaatcgattattggatctagctgtctgtatcatattcaacatgtttaatatatcctttcgtttcccctttacaggcatcgatcgtagcatattttccgcgtctgatatggaaatgttaaaactacaaaaatgcgtaatgttagcccgtcctaatattggtacgtgtctataagtttggcatagtagaataatagacgtgtttaaatgccttccaaagtttaagaattctattagagtattgcattttgatagtttatcgcctacatcatcaaaaataagtaaaaagtgtgctgattttttatgattttgtgcgacagcaatacatttttctatgttacttttagttcgtatcagattatattctagagattcctgactactaacgaaattaatatgatttggccaaatgtatccatcataatctgggttataaacgggtgtaaacaagaatatatgtttatattttttaactagtgtagaaaacagagatagtaaatagatagtttttccagatccagatcctcctgttaaaaccattctaaacggcatttttaataaattttctcttgaaaattgtttttcttggaaacaattcataattatatttacagttactaaattaatttgataataaatcaaaatatggaaaactaaggttgttagtagggaggagaacaaagaaggcacatcgtgatataaataacatttattatcatgatgacaccagaaaacgacgaagagcagacatctgtgttctccgctactgtttacggagacaaaattcagggaaagaataaacgcaaacgcgtgattggtctatgtattagaatatctatggttatttcactactatctatgattaccatgtccgcgtttctcatagtgcgcctaaatcaatgcatgtctgctaacgaggctgctattactgacgccgctgttgccgttgctgctgcatcatctactcatagaaaggttgcgtctagcactacacaatatgatcacaaagaaagctgtaatggtttatattaccagggttcttgttatatattacattcagactaccagttattctcggatgctaaagcaaattgcactgcggaatcatcaacactacccaataaatccgatgtcttgactacctggctcattgattatgttgaggatacatggggatctgatggtaatccaattacaaaaactacatccgattatcaagattctgatgtatcacaagaagttagaaagtatttttgtgttaaaacaatgaactaatatttatttttgtacattaataaatgaaatcgcttaatagacaaactgtaagtaggtttaagaagttgtcggtgccggccgctataatgatgatactctcaaccattattagtggcataggaacatttctgcattacaaagaagaactgatgcctagtgcttgcgccaatggatggatacaatacgataaacattgttatttagatactaacattaaaatgtctacagataatgcggtttatcagtgtcgtaaattacgagctagattgcctagacctgatactagacatctgagagtattgtttagtattttttataaagattattgggtaagtttaaaaaagaccaatgataaatggttagatattaataatgataaagatatagatattagtaaattaacaaattttaaacaactaaacagtacgacggatgctgaagcgtgttatatatacaagtctggaaaactggttaaaacagtatgtaaaagtactcaatctgtactatgtgttaaaaaattctacaagtgacaacaaaaaatgaattaataataagtcgttaacgtacgccgccatggacgccgcgtttgttattactccaatgggtgtgttgactataacagatacattgtatgatgatctcgatatctcaatcatggactttataggaccatacattataggtaacataaaaactgtccaaatagatgtacgggatataaaatattccgacatgcaaaaatgctactttagctataagggtaaaatagttcctcaggattctaatgatttggctagattcaacatttatagcatttgtgccgcatacagatcaaaaaataccatcatcatagcatgcgactatgatatcatgttagatatagaagataaacatcagccattttatctattcccatctattgatgtttttaacgctacaatcatagaagcgtataacctgtatacagctggagattatcatctaatcatcaatccttcagataatctgaaaatgaaattgtcgtttaattcttcattctgcatatcagacggcaatggatggatcataattgatgggaaatgcaatagtaattttttatcataaaagttgtaaagtaaataataaaacaataaatattgaactagtagtacgtatattgagcaatcagaaatgatgctggtacctcttatcacggtgaccgtagttgcgggaacaatattagtatgttatatattatatatttgtaggaaaaagatacgtactgtctataatgacaataaaattatcatgacaaaattaaaaaagataaagagttctaattccagcaaatctagtaaatcaactgatagcgaatcagactgggaggatcactgtagtgctatggaacaaaacaatgacgtagataatatttctaggaatgagatattggacgatgatagcttcgctggtagtttaatatgggataacgaatccaatgttatggcgcctagcacagaacacatttacgatagtgttgctggaagcacgctgctaataaataatgatcgtaatgaacagactatttatcagaacactacagtagtaattaatgaaacggagactgttgaagtacttaatgaagataccaaacagaatcctaactattcatccaatcctttcgtaaattataataaaaccagtatttgtagcaagtcaaatccgtttattacagaacttaacaataaatttagtgagaataatccgtttagacgagcacatagcgatgattatcttaataagcaagaacaagatcatgaacacgatgatatagaatcatcggtcgtatcattggtgtgattagtttcctttttataaaattgaagtaatatttagtattattgctgccgtcacgttgtacaaatggagatattccctgtattcggcatttctaaaattagcaattttattgctaataatgactgtagatattatatagatacagaacatcaaaaaattatatctgatgagatcaatagacagatggatgaaacggtacttcttaccaacatcttaagcgtagaagttgtaaatgacaatgagatgtaccatcttattcctcatagattatcgacgattatactctgtattagttctgtcggaggatgtgttatctctatagataatgacatcaatggcaaaaatattctaacctttcccattgatcatgctgtaatcatatccccactgagtaaatgtgtcgtagttagcaagggtcctacaaccatattggttgttaaagcggatatacctagcaaacgattggtaacatcgtttacaaacgacatactatatgtaaacaatctgtcactgattaattatttgccgttgtctgtattcattattagacgagtcaccgactatttggatagacacatatgcgatcagatatttgctaataataagtggtattcccttataaccatcgacgataagcaatatcctattccatcaaactgtataggtatgtcctctgccaagtacataaattctagcatcgagcaagatactttaatccatgtttgtaacctcgagcatccgttcgactcagtatacaaaaaaatgcagtcgtacaattctctacctatcaaggaacaaatattgtacggtagaattgataatataaatatgagcattagtatttctgtggattaatagatttctagtatggggatcattaatcatctctaatctctaaatacctcataaaacgaaaaaaaagctattatcaaatactgtacggaatggattcattctcttctctttttatgaaactctgttgtatatctactgataaaactggaagcaaaaaatctgatagaaagaataagaataagatcaaggattatatggaacacgattattataaaataacaatagttcctggttcctcttccacgtctactagctcgtggtattatacacatgcctagtaatagtctctttgcgttgacggaaagcagactagaaataacaggctaaaatgttcagacaccataatagttcccaacccagataataacagagttccatcaacacattcctttaaactcaatcccaaacccaaaaccgttaaaatgtatccggccaattgatagtagataatgaggtgtacagcgcatgataatttacacagtaaccaaaatgaaaatactttagtaattataagaaatatagacggtaatgtcatcatcaacaatccgataatatgcctgagagtaaacattgacggataaaacaaaaatgctccgcataactctatcatggcaataacacaaccaaatacttgtaagattcctaaattagtagaaaatacaacgaatatcgatgtataagtgatctcgagaaataataagaataaagtaatgcccgtaaagataaacatcaacattgtttggtaatcattaaaccaattagtatgaagttgaactaatttcacagtagattttattccagtgttatcctcgcatgtataagtacctggtaagatatctttatattccataatcaatgagacatcactatctgataacgaatgaagtctagcactagtatgccatttacttaatattgtcgtcttggaagttttattataagttaaaatatcatggttatccaatttccatctaatatactttgtcggattatctatagtacacggaataatgatggtatcattacatgctgtatactctatggtctttgtagttgttataacaaccaacgtatagaggtatatcaacgatattctaactcttgacattttttatttatttaaaatgatacctttgttatttattttattctattttgctaacggtattgaatggcataagtttgaaacgagtgaagaaataatttctacttacttattagacgacgtattatacacgggtgttaatggggcggtatacacattttcaaataataaactaaacaaaactggtttaactaataataattatataacaacatctataaaagtagaggatgcggataaggatacattagtatgcggaaccaataacggaaatcccaaatgttggaaaatagacggttcagacgacccaaaacatagaggtagaggatacgctccttatcaaaatagcaaagtaacgataatcagtcacaacggatgtgtactatctgacataaacatatcaaaagaaggaattaaacgatggagaagatttgacggaccatgtggttatgatttattcacggcggataacgtaattccaaaagatggtttacgaggagcattcgtcgataaagacggtacttatgacaaagtttacattcttttcactgatactatcggctcaaagagaattgtcaaaattccgtatatagcacaaatgtgcctaaacgacgaaggtggtccatcatcattgtctagtcatagatggtcgacgtttctcaaagtcgaattagaatgtgatatcgacggaagaagttatagacaaattattcattctagaactataaaaacagataatgatacgatactatatgtattcttcgatagtccttattccaagtccgcattatgtacctattctatgaataccattaaacaatctttttctacgtcaaaattggaaggatatacaaagcaattgccgtctccagctcctggtatatgtttaccagctggaaaagttgttccacataccacgtttgaagtcatagaacaatataatgtactagatgatattataaagcctttatctaaccaacctatcttcgaaggaccgtctggtgttaaatggttcgatataaaggagaaggaaaatgaacatcgggaatatagaatatacttcataaaagaaaattctatatattcgttcgatacaaaatctaaacaaactcgtagctcgcaagtcgatgcgcgactattttcagtaatggtaactgcgaaaccgttatttatagcagatatagggataggagtaggaatgccacaaatgaaaaaaatacttaaaatgtaatcttaatcgagtacaccacacgacaatgaacaaacataagacagattatgctggttatgcttgctgcgtaatatgcggtctaattgtcggaattatttttacagcgacactattaaaagttgtagaacgtaaattagttcatacaccattaatagataaaacgataaaagatgcatatattagagaagattgtcctactgactggataagctataataataaatgtatccatttatctactgatcgaaaaacctgggaggaaggacgtaatgcatgcaaagctctaaattcaaattcggatctaattaagatagagactccaaacgagttaagttttttaagaagccttagacgaggctattgggtaggagaatccgaaatattaaaccagacaaccccatataattttatagctaagaatgccacgaagaatggaactaaaaaacggaaatatatttgtagcacaacgaatactcccaaactgcattcgtgttacactatataacaattacactacatttttatcataccactacttcggttagatgttttagaaaaaaataaatatcgccgtaccgttcttgtttttataaaaataacaattaacaattatcaaattttttctttaatattttacgtggttgaccattcttggtggtaaaataatctcttagtgttggaatggaatgctgtttaatgtttccacactcatcgtatattttgacgtatgtagtcacatcgtttacgcaatagtcagactgtagttctatcatgcttcctacatcagaaggaggaacagttttaaagtctcttggttttaatctattaccgttagttttcatgaaatcctttgttttatccacttcacattttaaataaatgtccactatacattcttttgttaattttactagatcgtcatgggtcatagaatttataggttccgtagtccatggatccaaactagcaaacttcgcgtatacggtatcgcgattagtgtatacaccaactgtatgaaaattaagaaaacagtttaataaatcaacagaaatatttaatcctccgtttgatacagatgcgccatatttatggatttcggattcacacgttgtttgtctgaggtgttcgtctagtgttgcttctacgtaaacttcgattcccatatattctttattgtcagaatcgcataccgatttatcatcatacactgtttgaaaactaaatggtatacacatcaaaataataaataataacgagtacattctgcaatattgttatcgtaattggaaaaatagtgttcgagtgagttggattatgtgagtattggattgtatattttattttatattttgtaataagaataaaatgctaatgtcaagtttattccaatagatgtcttattaaaaacatatataataaataacaatggctgaatggcataaaattatcgaggatatctcaaaaaataataagttcgaggatgccgccatcgttgattacaagactacaaagaatgttctagctgctattcctaacagaacatttgccaagattaatccgggtgaaattattcctctcatcactaatcgtaatattctaaaacctcttattggtcagaaatattgtattgtatatactaactctctaatggatgagaacacgtatgctatggagttgcttactgggtacgcccctgtatctccgatcgttatagcgagaactcataccgcacttatatttttgatgggtaagccaacaacatccagacgtgacgtgtatagaacgtgtagagatcacgctacccgtgtacgtgcaactggtaattaaaataaaaagtaatattcatatgtagtgtcaattttaaatgatgatgatgaaatggataatatccatattgacgatgtcaataatgccggtattggcatacagttcatcgatttttagatttcattcagaggatgtggaattatgttatgggcatttgtattttgataggatctataatgtagtaaatataaaatataatccgcatattccatatagatataattttattaatcgcacgttaaccgtagatgaactagacgataatgtcttttttacacatggttattttttaaaacacaaatatggttcacttaatcctagtttgattgtctcattatcaggaaacttaaaatataatgatatacaatgctcagtaaatgtatcgtgtctcattaaaaatttggcaacgagtacatctactatattaacatctaaacataagacttattctctacatcggtccacgtgtattactataataggatacgattctattatatggtataaagatataaatgacaagtataatgacatctatgattttactgcaatatgtatgctaatagcgtctacattgatagtgaccatatacgtgtttaaaaaaataaaaatgaactcttaattatgctatgctattagaaatggataaaatcaaaattacggttgattcaaaaattggtaatgttgttaccatatcgtataacttggaaaagataactattgatgtcacacctaaaaagaaaaaagaaaaggatgtattattagcgcaatcagttgctgtcgaagaggcaaaagatgtcaaggtagaagaaaaaaatattatcgatattgaagatgacgatgatatggatgtagaaagcgcgtaatacgatctataaaaataagtatataaatactttttatttactgtactcttactgtgtagtggtgataccctactcgattatttttttaaaaaaaaaatacttattctgattcttctagccatttccgtgttcgtttgaatgccacatcgacgtcaaagataggggagtagttgaaatctagttctgcattgttggtacgcacctcaaatgtagtgttggatatcttcaacgtatagttgttgagtagtgatggttttctaaatagaattctcttcatatcattcttgcacgcgtacatttttagcatccatcttggaatcctagatccttgttctattcccaatggtttcatcaatagaagattaaacatatcgtacgaacacgatggagagtaatcgtagcaaaagtaagcatttcctttaatcttagatcccggatactggatatattttgcagccaacacgtgcatccatgcagcatttcctacatatacccggctatgcaccgcgtcatcatcgactgtacgatacataatgttaccgtgttgcttacattgctcgtaaaagactttcatcaatttgtctccttctccgtaaattccagtgggtcttaggcaacaagtatacaattttgctccattcatgattacggaattattggctttcataaccagttgctcggccatacgtttactttttgcgtatacatgtcctggtgatatatcataaagggtatgctcatggccgatgaatggatcaccgtgtttattgggtcctattgcttccatgctactagtatagatcaaatacttgattcctaggtccacacaagctgccaaaatagtctgtgttccataatagtttactttcatgatttcattatcggtgtattttccaaatacatccactagagcagccgtatgaataatcagatttaccccatctagcgcttctctcaccttatcaaagtcgtttatatcacattgtatatagtttataaccttaactttcgaggttattggttgtggatcttctacaatatctatgactctgatttcttgaacatcatctgcactaattaacagttttactatatacctgcctagaaatccggcaccaccagtaaccgcgtacacggccattgctgccactcataatatcagactacttattctattttactaaataatggctgtttgtataatagaccacgataatatcagaggagttatttactttgaaccagtccatggaaaagataaagttttaggatcagttattggattaaaatccggaacgtatagtttgataattcatcgttacggagatattagtcaaggatgtgattccataggcagtccagaaatatttatcggtaacatctttgtaaacagatatggtgtagcatatgtttatttagatacagatgtaaatatatttacaattattggaaaggcgttatctatttcaaaaaatgatcagagattagcgtgtggagttattggtatttcttacataaatgaaaagataatacattttcttacaattaacgagaatggcgtttgatatatcagttaatgcgtctaaaacaataaatgcattagtttacttttctactcagcaaaataaattagtcatacgtaatgaagttaatgatacacactacactgtcgaatttgatagggacaaagtagttgacacgtttatttcatataatagacataatgacaccatagagataagaggggtgcttccagaggaaactaatattggttgcgcggttagtatgacttacttgtataataagtatagttttaaactgattttagcagaatatataagacacagaaatactatatccggcaatatttattcggcattgatgacactagatgatttggctattaaacagtatggagacattgatctattatttaatgagaaacttaaagtagactccgattcgggactatttgactttgtcaactttgtaaaggatatgatatgttgtgattctagaatagtagtagctctatctagtctagtatctaaacattgggaattgacaaataaaaaatataggtgtatggcattagccgaacatatatctgatagtattccaatatctgagctatctagactacgatacaatctatgtaagtatctacgcggacacactgagagcatagaggataaatttgattattttgaagacgatgattcgtctacatgttctgccgtaaccgacagggaaacggatgtataattttttttatagcgtgaaggatatgataaaaaatataattgttgtatttatcccattccaatcaccttatatgattctgtaacacaataaaggagtcttatagatgtatagaggtcagatactggtttgataaactgtttattccacataagtatgtttgactttatggttagacccgcatactttaacaaatcactgaaaattggagttaggtattgacctctcagaatcagttgccgttctggaacattaaatgtattttttatgatatactccaacgcatttatgtgggcatacaacaagtcattactaatggaatattccaagagttttagttgtctagtatttaacaagagaagagatttcaacagactgtttatgaactcgaatgccgcctcattgtcgcttatattgatgatgtcgaattctcccaatatcatcaccgatgagtagctcatcttgttatcgggatccaagttttctaaagatgtcattaaaccctcgatcatgaatggatttatcatcatcgtttttatgttggacatgagcttagtccgtttgtccacatctatagaagatgatttctgaattatttcatatatctctctctttaactccaggaacttgtcaggatggtctactttaatatgttctcgtctaagagatgaaaatctttggatggttgcacgcgacttttctctaaaggatgacgttgcccaagatcctctcttaaatgaatccatcttatccttggacaagatggacagtctattttccttagatggtttaatatttttgttacccatgatctataaaggtagacctaatcgtctcggatgaccatatatttattttcagttttattatacgcataaattgtaaaaaatatgttaggtttacgaaaatgtctcgtggggcattaatcgtttttgaaggattggacaaatctggaaaaacaacacaatgtatgaacatcatggaatcaataccttcaaacacaataaaataccttaactttcctcagagatccactgtcactggaaagatgatagatgactatctaactcgtaaaaaaacctataatgatcatatagttaatctattattttgtgcaaatagatgggagtttgcatcttttatacaagaacaactagaacagggaattactttaatagttgatagatacgcattttctggagtagcgtatgccgccgctaaaggcgcgtcaatgactctcagtaagagttatgaatctggattgcctaaacccgacttagttatattcttggaatctggtagcaaagaaattaatagaaacgtcggtgaggaaatttatgaagatgttacattccaacaaaaggtattacaagaatataaaaaaatgattgaagaaggagatattcattggcaaattatttcttctgaattcgaggaagatgtaaagaaggagttgattaagaatatagttatagaggctatacacacggttactggaccagtggggcaactgtggatgtaatagtgaaattacattttttataaatagatgttagtacagtgttataaatggatgaagcatattactctggcaacttggaatcagtactcggatacgtgtccgatatgcataccgaactcgcatcaatatctcaattagttattgccaagatagaaactatagataatgatatattaaacaaggacattgtaaattttatcatgtgtagatcaaacttggataatccatttatctctttcctagatactgtatatactattatagatcaagagaactatcagactgagttgattaattcattagacgacaatgaaattatcgattgtatagttaataagtttatgagcttttataaggataacctagaaaatatagtagatgctatcattactctaaaatatataatgaataatccagattttaaaactacgtatgccgaagtactcggttccagaatagccgatatagatattaaacaagtgatacgtaagaatatactacaattgtctaataatatccgcgaacgatatttgtgaaaatattaaaaaaaaatactttttttattaaatgacgtcttttcgtgaatttagaaaattatgctgtgctatatatcacgcatcaggatataaagaaaaatctaaattaattagagactttataacagatagggatgataaatatttgatcattaagctattgcttcccggattagacgatagaatttataacatgaacgataaacaaattataaaattatatagtataatatttaaacaatctcaggaagatatgctacaagatttaggatacggatatataggagacactattaggactttcttcaaagagaacacagaaatccgtccacgagataaaagcattttaactttagaagaagtggatagttttttaactacgttatcatccgtaactaaagaatcgcatcaaataaaattattgactgatgtagcatctgtttgtacatgtaatgatttaaaatgtgtagtcatgcttattgataaagatctaaaaattaaagcgggtcctcggtacgtacttaacgctattagtcctaatgcctatgatgtgtttagaaaatctaataacttgaaagagataatagaaaattcatctaaacaaaatctagactctatatctatttctgttatgactccaattaatcccatgttagcggaatcgtgtgattctgtcaataaggcgtttaaaaaatttccatcaggaatgtttgcggaagtcaaatacgatggtgaaagagtacaagttcataaaaataataacgagtttgccttctttagtagaaacatgaaaccagtactctctcataaagtggattatctcaaagaatacataccgaaagcatttaaaaaagctacgtctatcgtattggattctgaaattgttcttgtagacgaacataatgtaccgctcccgtttggaagtttaggtatacacaaaaagaaagaatataaaaactctaacatgtgtttgttcgtgtttgactgtttgtactttgatggattcgatatgacggacattccattgtacgaacgaagatcttttctcaaagatgttatggttgaaatacccaatagaatagtattctcagagttgacgaatattagtaacgagtctcagttaactgacgtattggatgatgcactaacgagaaaattagaaggattggtcttaaaagatattaatggagtatacgaaccgggaaagagaagatggttaaaaataaagcgagactatttgaacgagggttccatggcagattctgccgatttagtagtactaggtgcctactatggtaaaggagcaaagggtggtatcatggcagtctttctaatgggttgttacgacgatgaatccggtaaatggaagacggttaccaagtgttcaggacacgatgataatacgttaagggagttgcaagaccaattaaagatgattaaaattaacaaggatcccaaaaaaattccagagtggttagtagttaataaaatctatattcccgattttgtagtagaggatccgaaacaatctcagatatgggaaatttcaggagcagagtttacatcttccaagtcccataccgcaaatggaatatccattagatttcctagatttactaggataagagaggataaaacgtggaaagaatctactcatctaaacgatttagtaaacttgactaaatcttaatagttacatacaaactgaaaattaaaataacactatttagttggtggtcgccatggatggtgttattgtatactgtctaaacgcgctagtaaaacatggcgaggaaataaatcatataaaaaatgatttcatgattaaaccatgttgtgaaagagtttgtgaaaaagtcaagaacgttcacattggcggacaatctaaaaacaatacagtgattgcagatttgccatatatggataatgcggtatccgatgtatgcaattcactgtataaaaagaatgtatcaagaatatccagatttgctaatttgataaagatagatgacgatgacaagactcctactggtgtatataattattttaaacctaaagatgccattcctgttatcatatctataggaaaggataaagatgtctgtgaactattaatctcatcagacatatcgtgtgcatgcgtggagttaaattcatatcacgtagccattcttcccatggatgtttccttttttaccaaaggaaatgcatcattgattattctcctgtttgatttctctatcgatgcggcacctctcttaagaagtgtaaccgataataatgttattatatctagacaccagcgtctacatgacgagcttccgagttccaattggttcaagttttacataagtataaagtccgactattgttctatattatatatggttgttgatggatctgtgatgcatgcgatagctgataatagaactcacgcaattattagcaaaaatatattagacaatactacgattaacgatgagtgtagatgctgttattttgaaccacagattaggattcttgatagagatgagatgctcaatggatcatcgtgtgatatgaacagacattgtattatgatgaatttacctgatgtaggcgaatttggatctagtatgttggggaaatatgaacctgacatgattaagattgctctttcggtggctggtaatttaataagaaatcgagactacattcccgggagacgaggatatagctactacgtttacggtatagcctctagataatttttttaagcacgaaataaaaaacataattttaaaccaatctatttcatactattttgtgtgatcaccatggacataaagatagatattagtatttctggtgataaatttacggtgactactaggagggaaaatgaagaaagaaaaaaatatctacctctccaaaaagaaaaaactactgatgttatcaaacctgattatcttgagtacgatgacttgttagatagagatgagatgtttactattctagaggaatattttatgtacagaggtctattaggcctcagaataaaatatggacgactctttaacgaaattaaaaaattcgacaatgatgcggaagaacaattcggtactatagaagaactcaagcagaaacttagattaaattctgaagagggagcagataactttatagattatataaaggtacaaaaacaggatatcgtcaaacttactgtatacgattgcatatctatgataggattgtgtgcatgcgtggtagatgtttggagaaatgagaaactgttttctagatggaaatattgtttacgagcgattaaactgtttattgatgatcacatgcttgataagataaaatctatactgcagaatagactagtatatgtggaaatgtcatagaaagttaaaagttaatgagagcaaaaatatataaggttgtattccatatttgttatttttttctgtaatagttagaaaaatacattcgatggtctatctatcagattattatgtgttataaggtactttttctcataataaactagagtatgagtaagatagtgtttttcaaaacatataaatctaaaattgatggatgagatatacagctattaatttcgaaaatatattttaatctgataactttaaacatggatttttaatggtggtttaacgttttaaaaaaagattttgttattgtagtatatgataatattaaaagatggatataaagaatttgctgactgcatgtactattttttacattactacattggctacggcagatatacctacttcgtcactgccacacgctccggtaaacggggcatgtgacgagggagaatatcttgataagaggcataatcaatgttgtaatcagtgtccacctggagaatttgccaaggttagatgtaatggtaacgataacacaaaatgtgaacgctgcccacctcatacatataccgcaatccccaattactctaatggatgtcatcaatgtagaaaatgcccaacaggatcatttgataaggtaaagtgtaccggaacacagaacagtaaatgttcgtgtcttcctggttggtattgcgctactgattcttcacagactgaagattgtcgagattgtataccaaaaaggagatgtccatgcggatactttggtggaatagatgaacaaggaaatcctatttgtaaatcgtgttgtgttggtgaatattgcgactacctacgtaattatagacttgatccatttcctccatgcaaactatctaaatgtaattaattatgattttgatgataatgttaccatacattatatcgctacttggttagtgtattattcagtatgaagacctattaataattacttatcttttgacgatcttgttataattataatataaaaatacttatggcatagtaactcataattgctgacgcgataaattcgtaataatctgttttgttcaaatttttataaggaatctacaggcataaaaataaaaatataatttataatatactcttacagcgcgccatcatgaataacagcagtgaattgattgctgttattaatggatttagaaatagtggacgattttgtgatattaatatagttattaatgatgaaaggataaacgctcacagactcatcctatctggagcctccgaatatttttccattctgttttccaataattttatcgattctaatgaatacgaagttaatctaagtcatttagattatcaaagtgttaacgatttgatcgattacatttatgggatacctttgagcctaactaacgataacgtgaaatatattctttcaaccgctgattttttacaaattggatctgctattacggagtgtgaaaattacatacttaaaaatctttgttctagaaactgtatcgatttctacatatacgctgataaatataataacaagaaaatagaatcagcgtcgtttaacacaatattacaaaatattttgagactcatcaacgatgaaaactttaaatacttaacagaggaatcaatgataaaaattttaagcgatgatatgttaaatataaaaaatgaggatttcgccccactaattctcattaaatggttagagagtactcaacaaccatgcaccgtcgagttacttaaatgcctcagaatatcattgctttccccacaagttataaaatcactttatagtcatcgactggttagttcaatctacgaatgtataacattcttaaacaatatagcattcttggatgaatcatttcctagataccatagcatcgagttgatatctatcggtataagtaattcgcatgataagatttccataaactgctacaatcataaaaaaaatacatgggaaatgatatcttcacgtagatataggtgtagtttcgcagtggccgtcctggataatattatctatatgatgggtggatatgatcagtccccgtatagaagttcaaaggttatagcgtacaatacatgtacaaattcttggatatatgatataccagagctaaaatatcctcgttctaattgtgggggactggctgatgacgaatacatttattgtataggcggcatacgcgatcaggattcatcgttgacatctagtattgatagatggaagccatcaaaaccatattggcagaagtatgctaaaatgcgcgaaccaaaatgtgatatgggggttgcgatgttaaacggattaatatatgttataggtggaatcgttaaaggtgacacgtgtaccgacgcactagagagtttatcagaagatggatggatgaagcatcaacgtcttccaataaaaatgtccaatatgtcgacgattgttcatgatggcaagatttatatatctggaggttacaacaatagtagtgtagttaatgtaatatcgaatctagtccttagctataattcgatatatgatgaatggaccaaattatcatcattaaacattcctagaattaatcccgctctatggtcagcgcataataaattatatgtaggaggaggaatatctgatgatgttcgaactaatacatctgagacatacgacaaagaaaaagattgttggacattggataatggtcacgtgttaccacgcaattatataatgtataaatgcgaaccgattaaacataaatatccattggaaaaaacacagtacacgaatgattttctaaagtatttggaaagttttataggtagttgatagaacaaaatacataattttgtaaaaataaatcactttttatactaatatgacacgattaccaatacttttgttactaatatcattagtatacgctacaccttttcctcagacatctaaaaaaataggtgatgatgcaactctatcatgtaatcgaaataatacaaatgactacgttgttatgagtgcttggtataaggagcccaattccattattcttttagctgctaaaagcgacgtcttgtattttgataattataccaaggataaaatatcttacgactctccatacgatgatctagttacaactatcacaattaaatcattgactgctagagatgccggtacttatgtatgtgcattctttatgacatcgcctacaaatgacactgataaagtagattatgaagaatactccacagagttgattgtaaatacagatagtgaatcgactatagacataatactatctggatctacacattcaccggaaactagttctgagaaacctgattatatagataattctaattgctcgtcggtattcgaaatctaagctcttttttttttttttttttttggcatataaataagtcgacccaccatggagacagacacactcctgctatgggtactgctgctctgggttccaggttccactggtgacgaggtccaactggtggagtcagggggagggctggtccagcctggagggtccctgaggctctcctgtgcagcctctggattcactatcagcgactactggatccactgggttcgccaggccccgggcaagggcctggagtgggtcgcaggaatcaccccagccggtggttacacctactacgccgactcagtcaagggacgattcaccatctccgccgacacctccaagaacaccgcctacctgcaaatgaacagcctgagggccgaggacacggccgtgtattactgtgcaaggttcgtgttcttcctgccatatgccatggactactggggccaagggaccctggtcaccgtctcctcaggtggtggcggttcaggcggaggtggctctggcggtggcggatcggacattcagatgacccagtctccaagctccctgtccgctagcgtcggagacagggtcactatcacttgcagagcttcccaggacgtctccactgcagtggcatggtaccagcagaagccagggaaggcaccaaagctccttatttactcagcaagcttcctttactccggagtcccatcccgattcagcggcagcggcagtggcacagattttaccctcacaatttcaagcctccaaccagaggatttcgcaacctactactgtcaacaaggctacggcaacccattcaccttcgggcaagggaccaaggttgagattaagcgataattaattaatttttatcgatctaattcaacaatgtctggagagcttcgcaggatcccgactccggaaccaattactgataaagaagaagatcatacagttacagacactgtctcatacactacagtaagtacatcatctggaattgtcactactaaatcaaccaccgatgatacgtacaatgataatgatacagtaccaccaactactgtaggcggtagtacaacctctattagcaattataaaaccaaggactttgtagaaatatttggtattaccgcattaattatattgtcggccgtggcaatattctgtattacgtattatatatgtaataaacgttcacgtaaatacaaaacagagaacaaagtctagatttttgacttacataaatgtctgggatagtaaaatctatcatattgagcggaccatctggtttaggaaagacagccatagccaaaagactatgggaatatatttggatttgtggtgtcccataccactagatttcctcgtcctatggaacgagaaggtgttgattaccattacgttaacagagaggccatctggaagggaatagccgccggaaactttctagaacatactgagtttttaggaaatatttacggaacttctaaaacagctgtgaatacagcggctattaataatcgtatttgtgtgatggatctaaacatcgacggtgttagaagtcttaaaaatacgtacctaatgccttactcggtgtatataagacctacctctcttaaaatggttgagaccaagcttcgtcgtagaaacactgaagctaacgatgagattcatcgtcgtgtgatgttggcaaaaactgacatggatgaggcaggtgaagccggtctattcgacactattatcattgaagatgatgtgaatttagcatatagtaagttaattcagatactacaggaccgtattagaatgtattttaacactaattagagacttaagacttaaaacttgataattaataatataactcgtttttatatgtgtctatttcaacgtctaatgtattagttaaatattaaaacttaccacgtaaaacttaaaatttaaaatgatatttcattgacagatagatcacacattatgaactttcaaggacttgtgttaactgacaattgcaaaaatcaatgggtcgttggaccattaataggaaaaggtggattcggtagtatttatactactaatgacaataattatgtagtaaaaatagagcccaaagctaacggatcattatttaccgaacaggcattttatactagagtacttaaaccatccgttatcgaagaatggaaaaaatctcacaatataaagcacgtaggtcttatcacgtgcaaggcatttggtctatacaaatccattaatgtggaatatcgattcttggtaattaatagattaggtgcagatctagatgcggtgatcagagccaataataatagactaccaaaaaggtcggtgatgttgatcggaatcgaaatcttaaataccatacaatttatgcacgagcaaggatattctcacggagatattaaagcgagtaatatagtcttagatcaaatagataagaataaattatatctagtggattacggattggtttctaaattcatgtctaatggcgaacatgttccatttataagaaatccaaataaaatggataacggtactctagaatttacacctatagattcgcataaaggatacgttgtatctagacgtggagatctagaaacacttggatattgtatgattagatggttgggaggtatcttaccatggactaagatatctgaaacaaagaattgtgcattagtaagtgccacaaaacagaaatatgttaacaatactgcgactttgttaatgaccagtttgcaatatgcacctagagaattgctgcaatatattaccatggtaaactctttgacatattttgaggaacccaattacgacaagtttcggcacatattaatgcagggtgtatattattaagtgtggtgtttggtcgataaaaattaaaaaataacttaatttattattgatctcgtgtgtacaaccgaaatcatggcgatgttttacgcacacgctctcggtgggtacgacgagaatcttcatgcctttcctggaatatcatcgactgttgccaatgatgtcaggaaatattctgttgtgtcagtttataataacaagtatgacattgtaaaagacaaatatatgtggtgttacagtcaggtgaacaagagatatattggagcactgctgcctatgtttgagtgcaatgaatatctacaaattggaaatccgatccatgatcaagaaggaaatcaaatctctatcatcacatatcgccacaaaaactactatgctctaagcggaatcgggtacgagagtctagacttgtgtttggaaggagtagggattcatcatcacgtacttgaaacaggaaacgctgtatatggaaaagttcaacatgattattctactatcaaagagaaggccaaagaaatgagtgcacttagtccaggacctatcatcgattaccacgtctggataggagattgtatctgtcaagttactgctgtggacgtacatggaaaggaaattatgaaaatgagattcaaaaagggtgcggtgcttccgatcccaaatctggtaaaagttaaacttggggagaatgatacagaaaatctttcttctactatatcggcggcaccatcgaggtaaccacctctctggaagacagcgtgaatcatgtactcatgaaacgtttggaaactatacgccatatgtggtctgttgtatatgatcattttgatattgtgaatggtaaagaatgctgttatgtgcatacgcattcatctaatcaaaatcctataccgagtactgtaaaaacaaatttgtacatgaagactatgggatcatgcattcaaatggattccatggaagctctagagtatcttagcgaactgaaggaatcaggtggatggagtcccagaccagaaatgcaggaatttgaatatccagatggagtggaagacactgaatcaattgagagattggcagaggagttcttcaatagatcagaacttcaggctggtgaatcagtcaaatttggtaattctattaattgttaaacatacatctgtttcagctaagcaactaagaacacgtatacggcagcagcttccttctatactctcatcttttaccaacacaaagggtggatatttgttcattggagttgataataatacacacaaagtatttggattcacggtgggttacgactacctcagactgatagagaatgatatagaaaagcatatcaaaagacttcgtgttgtgcatttctgtgagaagaaagaggacatcaagtacgcgtgtcgattcatcaaggtatataaacctggggatgagactacctcgacatacgtgtgcgctatcaaagtggaaagatgctgttgtgctgtgtttgcagattggccagaatcatggtatatggatactaatggtatcaagaagtattctccagatgaatgggtgtcacatataaaattttaattaatgtaactatagagaacaaataataaggttgtaatatcatatagacaataactaacaattaattagtaactgttatctcttttttaactaaccaactaactatatacctattaatacatcgtaattatagttcttaacatctattaatcattaattcgcttctttaattttttataaactaacattgttaattgaaaagggataacatgttacagaatataaattatatatggatttttttaaaaaggaaatacttgactggagtatatatttatctcttcattatatagcacgcgtgttttccaatttttccacatcccatataatacaggattataatctcgttcgaacatacgagaaagtggataaaacaatagttgattttttatctaggttgccaaatttattccatattttagaatatggggaaaatattctacatatttattctatggatgatgctaatacgaatattataattttttttctagatagagtattaaatattaataagaacgggtcatttatacacaatctcgggttatcatcatccattaatataaaagaatatgtatatcaattagttaataatgatcatccagataataggataagactaatgcttgaaaatggacgtagaacaagacattttttgtcctatatatcagatacagttaatatctatatatgtattttaataaatcatggattttatatagatgccgaagacagttacggttgtacattattacatagatgtatatatcactataagaaatcagaatcagaatcatacaatgaattaattaagatattgttaaataatggatcagatgtagataaaaaagatacgtacggaaacacaccttttatcctattatgtaaacacgatatcaacaacgtggaattgtttgagatatgtttagagaatgctaatatagactctgtagactttaatagatatacacctcttcattatgtctcatgtcgtaataaatatgattttgtaaagttattaatttctaaaggagcaaatgttaatgcgcgtaataaattcggaactactccattttattgtggaattatacacggtatctcgcttataaaactatatttggaatcagacacagagttagaaatagataatgaacatatagttcgtcatttaataatttttgatgctgttgaatctttagattatctattatccagaggagttattgatattaactatcgtactatatacaacgaaacatctatttacgacgctgtcagttataatgcgtataatacgttggtctatctattaaacaaaaatggtgattttgagacgattactactagtggatgtacatgtatttcggaagcagtcgcaaacaacaacaaaataataatggaagtactattgtctaaacgaccatctttgaaaattatgatacagtctatgatagcaattactaaacataaacagcataatgcagatttattgaaaatgtgtataaaatatactgcgtgtatgaccgattatgatactcttatagatgtacagtcgctacagcaatataaatggtatattttaagatgtttcgatgaaatagatatcatgaagagatgttatataaaaaataaaactgtattccaattagttttttgtatcaaagacattaatactttaatgagatacggtaaacatccttctttcgtgaaatgcactagtctcgacgtatacggaagtcgtgtacgtaatatcatagcatctattagatatcgtcagagattaattagtctattatccaagaagctggatcctggagataaatggtcgtgttttcctaacgaaataaaatataaaatattggaaaactttaacgataacgaactatccacatatctaaaaatcttataaacattattaaaatataaaatctaagtaggataaaatcacactacatcattgtttccttttagtgctcgacagtgtatactatttttaacgctcataaataaaaatgaaaacgatttccgttgttacgttgttatgcgtactacctgctgttgtttattcaacatgtactgtacccactatgaataacgctaaattaacgtctaccgaaacatcgtttaatgataaccagaaagttacgtttacatgtgatcagggatatcattctttggatccaaatgctgtctgtgaaacagataaatggaaatacgaaaatccatgcaaaaaaatgtgcacagtttctgattatgtctctgaactatataataaaccgctatacgaagtgaattccaccatgacactaagttgcaacggcgaaacaaaatattttcgttgcgaagaaaaaaatggaaatacttcttggaatgatactgttacgtgtcctaatgcggaatgtcaacctcttcaattagaacacggatcgtgtcaaccagttaaagaaaaatactcatttggggaatatatgactatcaactgtgatgttggatatgaggttattggtgcttcgtacataagttgtacagctaattcttggaatgttattccatcatgtcaacaaaaatgtgatatgccgtctctatctaacggattaatttccggatctacattttctatcggtggcgttatacatcttagttgtaaaagtggttttacactaacggggtctccatcatccacatgtatcgacggtaaatggaatcccatactcccaatatgtgtacgaactaacgaaaaatttgatccagtggatgatggtcccgacgatgagacagatttgagcaaactctcgaaagacgttgtacaatatgaacaagaaatagaatcgttagaagcaacttatcatataatcatagtggcgttgacaattatgggcgtcatatttttaatctccgttatagtattagtttgttcctgtgacaaaaataatgaccaatataagttccataaattgctaccgtaaatataaatccgttaaaataattaataatttaataacaaacaagtatcaaaagattaaagacttatagctagaatcaattgagatgtcttcttcagtggatgttgatatctacgatgccgttagagcatttttactcaggcactattataacaagagatttattgtgtatggaagaagtaacgccatattacataatatatacaggctatttacaagatgcgccgttataccgttcgatgatatagtacgtactatgccaaatgaatcacgtgttaaacaatgggtgatggatacacttaatggtataatgatgaatgaacgcgatgtttctgtaagcgttggcaccggaatactattcatggaaatgtttttcgattacaataaaaatagtatcaacaatcaactaatgtatgatataattaatagcgtatctataattctagctaatgagagatatagaagcgcttttaacgacgatggtatatacatccgtagaaatatgattaacaagttgtacggatacgcatctctaactactattggcacgatcgctggaggtgtttgttattatctgttgatgcatctagttagtttgtataaataattatttcaatatactagttaaaattttaagattttaaatgtataaaaaactaataacgtttttatttgtaataggtgcattagcatcctattcgaataatgagtacactccgtttaataaactgagtgtaaaactctatatagatggagtagataatatagaaaattcatatactgatgataataatgaattggtgttaaattttaaagagtacacaatttctattattacagagtcatgcgacgtcggatttgattccatagatatagatgttataaacgactataaaattattgatatgtataccattgactcgtctactattcaacgcagaggtcacacgtgtagaatatctaccaaattatcatgccattatgataagtacccttatattcacaaatatgatggtgatgagcgacaatattctattactgcagagggaaaatgctataaaggaataaaatatgaaataagtatgatcaacgatgatactctattgagaaaacatactcttaaaattggatctacttatatatttgatcgtcatggacatagtaatacatattattcaaaatatgatttttaaaaatttaaaatatattatcacttcagtgacagtagtcaaataacaaacaacaccatgagatatattataattctcgcagttttgttcattaatagtatacatgctaaaataactagttataagtttgaatccgtcaattttgattccaaaattgaatggactggggatggtctatacaatatatcccttaaaaattatggcatcaagacgtggcaaacaatgtatacaaatgtaccagaaggaacatacgacatatccgcatttccaaagaatgatttcgtatctttctgggttaaatttgaacaaggcgattataaagtggaagagtattgtacgggactatgcgtcgaagtaaaaattggaccaccgactgtaacattgactgaatacgacgaccatatcaatttgtacatcgagcatccgtatgctactagaggtagcaaaaagattcctatttacaaacgcggtgacatgtgtgatatctacttgttgtatacggctaacttcacattcggagattctaaagaaccagtaccatatgatatcgatgactacgattgcacgtctacaggttgcagcatagactttgtcacaacagaaaaagtgtgcgtgacagcacagggagccacagaagggtttctcgaaaaaattactccatggagttcgaaagtatgtctgacacctaaaaagagtgtatatacatgcgcaattagatccaaagaagatgttcccaatttcaaggacaaaatggccagagttatcaagagaaaatttaatacacagtctcaatcttatttaactaaatttctcggtagcacatcaaatgatgttaccacttttcttagcatgcttaacttgactaaatattcataactaatttttattaatgatacaaaaacgaaataaaactgcatattatacactggttaacgcccttataggctctaaccattttcaagatgaggtccctgattatagtccttctgttcccctctatcatctactccatgtctattagacgatgtgagaagactgaagaggaaacatggggattgaaaatagggttgtgtataattgccaaagatttctatcccgaaagaactgattgcagtgttcatctcccaactgcaagtgaaggattgataactgaaggcaatggattcagggatatacgaaacaccgataaattataaaaaaagcaatgtgtccgctgtttccgttaataatactattttcgtaactggcggattattcataaataactctaatagcacgatcgtggttaacaatatggaaaaacttgacatttataaagacaaacaatggtcgattatagaaatgcctatggctagggtatatcacggcattgactcgacatttggaatgttatattttgccggaggtctatccgttaccgaacaatatggtaatttagagaaaaacaacgagatatcttgttacaatcctagaacgaataagtggtttgatatttcatatactatttataagatatccatatcatcattgtgtaaactaaataacgtcttctatgtatttagtaaggacattggatatgtggaaaagtatgatggtgcatggaagttagtacatgatcgtctccccgctataaaggcattatcaacttctccttattgattgaaaatgaaaatataaatagtttttatgtatagcagtattaccctatagttttattgcttactactaacatggatacagatgttacaaatgtagaagatatcataaatgaaatagatagagagaaagaagaaatactaaaaaatgtagaaattgaaaataataaaaacattaacaagaatcatcccaatgaatatattagagaagcactcgttattaataccagtagtaatagtgattccattgataaagaagttatagaatgtatcagtcacgatgtaggaatatagatcatatctactaatttttataatcgatacaaaacataaaaaacaactcgttattacatagcaggcatggaatccttcaagtattgttttgataacgatggcaagaaatggattatcggaaatactttatattctggtaattcaatactctataaggtcagaaaaaatttcactagttcgttctacaattacgtaatgaagatagatcacaaatcacacaagccattgttgtctgaaatacgattctatatatctgtattggatcctttgactatcgacaactggacacgggaacgtggtataaagtatttggctattccagatctgtatggaattggagaaaccgatgattatatgttcttcgttataaagaattcgggaagagtattcgccccaaaggatactgaatcagtcttcgaagcatgcgtcactatgataaacacgttagagtttatacactctcgaggatttacccatggaaaaatagaaccgaggaatatactgattagaaataaacgtctttcactaattgactattctagaactaacaaactatacaagagtggaaactcacatatagattacaacgaggacatgataacttcaggaaatatcaattatatgtgtgtagacaatcatcttggagcaacagtttcaagacgaggagatttagaaatgttgggatattgcatgatagaatggttcggtggcaaacttccatggaaaaacgaaagtagtataaaagtaataaaacaaaaaaaagaatataaaaaatttatagctactttctttgaggactgttttcctgaaggaaatgaacctctggaattagttagatatatagaattagtatacacgttagattattctcaaactcctaattatgacagactacgtaaactgtttatacaagattgaaattatattcttttttttatagagtgtggtagtgttacggatatctaatattaatattagactatctctatcgcgctacacgaccaatatcgattactatggatatcttctatgaaaggagagaatgtatttatttctccagcgtcaatctcgtcagtattgacaatactgtattatggagctaatggatccactgctgaacagctatcaaaatatgtagaaacggaggagaacacggataaggttagcgctcagaatatctcattcaaatccatgaataaagtatatgggcgatattctgccgtgtttaaagattcctttttgagaaaaattggcgataagtttcaaactgttgacttcactgattgtcgcactatagatgcaatcaacaagtgtgtagatatctttactgaggggaaaatcaatccactattggatgaaccattgtctcctagcaattagtgccgtatactttaaagcaaaatggttgacgccattcgaaaaggaatttaccagtgattatcccttttacgtatctccgacggaaatggtagacgtaagtatgatgtctatgtacggcaaggcatttaatcacgcatctgtaaaagaatcattcggcaacttttcaatcatagaactgccatatgttggagatactagtatgatggtcattcttccagacaagattgatggattagaatccatagaacaaaatctaacagatacaaattttaagaaatggtgtgactttatggatgctatgtttatagatgttcacattcccaagtttaaggtaacaggctcgtataatctggtggatactctagtaaagtcaggactgacagaggtgttcggttcaactggagattatagcaatatgtgtaatttagatgtgagtgtcgacgctatgatccacaaaacgtatatagatgtcaatgaagagtatacagaagcagctgcagcaacttctgtactagtggcagactgtgcatcaacaattacaaatgagttctgtgcagatcatccgttcatctatgtgattaggcatgttgatggaaaaattcttttcgttggtagatattgctctccgacaactaattgttaaccattttttttaaaaaaaatagaaaaaacatgtggtattagtgcaggtcgttgttcttccaattgcaattggtaagatgacggccaactttagtacccacgtcttttcaccacagcactgtggatgtgacagactgaccagtattgatgacgtcaaacaatgtttgactgaatatatttattggtcgtcctatgcataccgcaacaggcaatgcgctggacaattgtattccacactcctctcttttagagatgatgcggaattagtgttcatcgacattcgcgagctggtaaaaaatatgccgtgggatgatgtcaaagattgtacagaaatcatccgttgttatataccggatgagcaaaaaaccatcagagagatttcggccatcatcggactttgtgcatatgctgctacttactggggaggtgaagaccatcccactagtaacagtctgaacgcattgtttgtgatgcttgagatgctaaattacgtggattataacatcatattccggcgtatgaattgatgagttgtacatcttgacattttctttcttctcttctccctttcttctcttctcccttcctccctcttctccctttcccagaaacaaacttttttacccactataaaataaaatgagtatactacctattatatttcttcctatatttttttattcttcattcgttcagacttttaacgcgtctgaatgtatcgacaaagggcaatattttgcatcattcatggagttagaaaacgagccagtaatcttaccatgtcctcaaataaatacgctatcatccggatataatatattagatattttatgggaaaaacgaggagcggataatgatagaattataccgatagataatggtagcaatatgctaattctgaacccgacacaatcagactctggtatttatatatgcattaccacgaacgaaacctactgtgacatgatgtcgttaaatttgacaatcgtgtctgtctcagaatcaaatatagatcttatctcgtatccacaaatagtaaatgagagatctactggcgaaatggtatgtcccaatattaatgcatttattgctagtaacgtaaacgcagatattatatggagcggacatcgacgccttagaaataagagacttaaacaacggacacctggaattattaccatagaagatgttagaaaaaatgatgctggttattatacatgtgttttagaatatatatacggtggcaaaacatataacgtaaccagaattgtaaaattagaggtacgggatagaataataccttctactatgcaattaccagatggcattgtaacttcaataggtagtaatttgactattgcatgcagagtatcgttgagacctcccacaacggacaccgacgtcttttggataagtaatggtatgtattacgaagaagatgatggggacggaaacggtagaataagtgtagcaaataaaatctatatgaccgataagagacgtgttattacatcccggttaaacattaatcctgtcaaggaagaagatgctacaacgtttacgtgtatggcgtttactattcctagcatcagcaaaacagttactgttagtataacgtgaatgtatgttgttacatttccatgtcaattgagtttataagaatttttatacattatcttccaacaaacaattgacgaacgtattgctatgattaactcccacgatactatgcatattattaatcattaacttgcagactatacctagtgctattttgacatactcgtgttcttgtgtaattgcggtatctatattattaaagtacgtaaatctagctatagttttattatttaattttagataatataccgtctccttatttttaaaaattgccacatcctttattaaatcatgaatgggaatttctatgtcatcgttagtatattgtgaacaacaagagcagatatctataggaaagggtggaatgcgatacattgatctatgtagttttaaaacacacgcgaactttgaagaatttatataaatcattccatcgatacatccttctatgttgacatgtatatatccaggaattcttttattaatgtcaggaaatgtataaactaaaacattgcccgaaagcggtgcctctatctgcgttatatccgttcttaacttacaaaatgtaaccaatacctttgcatgacttgttttgttcggcaacgttagtttaaacttgacgaatggattaattacaatagcatgatccgcgcatctattaagtttttttactttaacgcccttgtatgtttttacagagactttatctaaatttctagtgcttgtatgtgttataaatataacgggatatagaaccgaatcacctaccttagatacccaattacattttatcagatccagataataaacaaattttgtcgccctaactaattctatattgttatatattttacaattggttatgatatcatgtaataacttggagtctaacgcgcatcgtcgtacgtttatacaattgtgatttagtgtagtatatctacacatgtatttttccgcactatagtattctggactagtgataaaactatcgttatatctgtcttcaatgaactcatcgagatattgctctctgtcatattcatacacctgcataaactttctagacatcttacaatccgtgttattttaggatcatatttacatatttacgggtatatcaaagatgttagattagttaatgggaatcgtctataataatgaatattaaacaattatatgaggacttttaccacaaagcatcataaaaatgagtcgtcgtctgatttatgttttaaatatcaaccgcaaatcaactcataaaatacaagagaatgaaatatatacatattttagtcattgcaatatagaccatacttctacagaacttgattttgtagttaaaaactatgatctaaacagacgacaacctgtaactgggtatactgcactacactgctatttgtataataattactttacaaacgatgtactgaagatattattaaatcatgacgtaaatgtaacgatgaaaaccagtagcggacgtatgcctgtttatatattgcttactagatgttgtaatatttcacatgatgtagtgatagatatgatagacaaagataaaaaccacttattacatagagactattccaacctattactagagtatataaaatctcgttacatgttattgaaggaagaggatatcgatgagaacatagtatccactttattagataagggaatcgatcctaactttaaacaagacggatatacagcgttacattattattatttgtgtctcgcacacgtttataaactaggtgagtgtagaaaaccgataacgataaaaaaggccaagcgaattatttctttgtttatacaacatggagctaatctaaacgcgttagataattgtggtaatacaccattccatttgtatcttagtattgaaatgtgtaataatattcatatgactaaaatgctgttgacttttaatccgaatttcaaaatatgtaataatcatggattaacgcctatactatgttatataacttccgactacatacaacacgatattcttgttatgttaatacatcactatgaaacaaatgttggagaaatgccgatagatgagcgtcgtatgatcgtattcgagtttatcaaaacatattctacacgtccggcagattcgataacttatttgatgaataggtttaaaaatataaatatttatacccgctatgaaggaaagacattattacacgtagcatgtgaatataataatacacaagtaatagattatcttatacgtatcaacggagatataaatgcgttaaccgacaataacaaacacgctacacaactcattatagataacaaagaaaattccccatataccattaattgtttactgtatatacttagatatattgtagataagaatgtgataagatcgttggtggatcaacttccatctctacctatcttcgatataaaatcatttgagaaattcatatcctactgtatacttttagatgacacattttacgataggcacgttaagaatcgcgattctaaaacgtatcgatacgcattttcaaaatacatgtcgtttgataaatacgatggtataataactaaatgtcacgacgaaacaatgttactcaaactgtccactgttctagacactacactatatgcagttttaagatgtcataattcgagaaagttaagaagatacctcaacgagttaaaaaaatataataacgataagtcctttaaaatatattctaatattatgaatgagagataccttaatgtatattataaagatatgtacgtgtcaaaggtatatgataaactatttcctgttttcacagataaaaattgtctactaacattactaccttcagaaattatatacgaaatattatacatgctgacaattaacgatctttataatatatcgtatccacctaccaaagtatagttgtatttttctcatgcgatgtgtgtaaaaaaactgatattatataaatattttagtgccgtataataaagatgacgatgaaaatgatggtacatatatatttcgtatcattattgttattgctattccacagttacgccatagacatcgaaaatgaaatcacagaattcttcaataaaatgagagatactctaccagctaaagactctaaatggttgaatccagcatgtatgttcggaggcacaatgaatgatatagccgctctaggagagccattcagcgcaaagtgtcctcctattgaagacagtcttttatcgcacagatataaagactatgtggttaaatgggagaggctagaaaagaatagacggcgacaggtttctaataaacgtgttaaacatggtgatttatggatagccaactatacatctaaattcagtaaccgtaggtatttgtgcaccgtaactacaaagaatggtgactgtgttcagggtatagttagatctcatattaaaaaacctccttcatgcattccaaaaacatatgaactaggtactcatgataagtatggcatagacttatactgtggaattctttacgcaaaacattataataatataacttggtataaagataataaggaaattaatatcgacgacattaagtattcacaaacgggaaaggaattaattattcataatccagagttagaagatagcggaagatacgactgttacgttcattacgacgacgttagaatcaagaatgatatcgtagtatcaagatgtaaaatacttacggttataccgtcacaagaccacaggtttaaactaatactagatccgaaaatcaacgtaacgataggagaacctgccaatataacatgcactgctgtgtcaacgtcattattgatcgacgatgtactgattgaatgggaaaatccatccggatggcttataggattcgattttgatgtatactctgttttaactagtagaggcggtatcaccgaggcgaccttgtactttgaaaatgttactgaagaatatataggtaatacatataaatgtcgtggacacaactattattttgaaaaaacccttacaactacagtagtattggagtaaatatacaatgcatttttatatacattactgaattattattactgaattattattactgaattattattaattatatcgtatttgtgctatagaatggatgaagatacgcgactatctaggtatttgtatctcaccgatagagaacatataaatgtagactctattaaacagttgtgtaaaatatcagatcctaatgcatgttatagatgtggatgtacggctttacatgagtacttttataattatagatcagtcaacggaaaatacaagtatagatacaacggttactatcaatattattcatctagcgattatgaaaattataatgaatattattatgatagaactggtatgaacagtgagagtgataatatatcaatcaaaacagaatatgaattctatgatgaaacacaagatcaaagtacacaactagtaggttacgacattaaactcaaaaccaatgaggatgattttatggctatgatagatcagtgggtgtccatgattatatagatgaatcaattaataaagtagtatatggaagagagtctcacgtaagatggcgggatatatggcaagaacataatgatggcgtatacagtataggaaaggagtgcatagataatatatacgaagacaaccataccgtagacgaattctacaagatagacagcgtatcagatgtagatgacgcggaacacatatctccgataactaaaaaaccatagaatcagttgatgataatacctacatttctaatcttccgtataccatcaaatacaaaatattcgagcaacaataagtattttttatacctttaaaactgataaataaattttttctagtgatattttggcaagatgagaatcctatttctcatcgctttcatgtatgggtgtgttcactcatatgttaacgcggttgaaaccaaatgtccaaatctagacattgtaacatcttctggagaatttcattgttcaggatgtgtggaacatatgcctgagtttagctatatgtattggttggcaaaggatatgaaatcggacgaggataccaagtttatagaacatctgggtgatggcatcaaagaagatgaaaccgttcgtaccacagatagtggaatcgtcactctacgtaaagtccttcatgtgactgatactaataaatttgataattataggttcacttgtgtcctcgctacgctagatggcatttataaaaagaatgtttgctgaagtagttgtgtgctactatttttatttatgatataatctaatggaattaatttgaattgatatttatccaatactaaagattatattagaatcaaattaatcttttatacgagaaaaaataacgacatacgtcgtcaacaaattaaactttttatttattagttaactagcttatagaacttgctcattgttatgtttctaaaacgggtacggcatataggacaattatccgacgcaccggtttctcttcgtgttctatgccatatattgatgcatgttatgcaaaatatatgagtacacgaatccaataaaccaaagtatctatcgttttgagtaaacaacttcatagcaaattccacattctttttctttacttactctatacacgtcctcgtatttatttagtattttgatgatatccaactcagaaatggttgttgtattattgggtgtatttggagtataggtattattagctatgtaccaatttaccaaccctcttaatattgattgataatcacatcggttatccaattaataactaaattgtagtgtatatatagaccatatatgtttctatttttttgacagttacgtatagtttcagtaagttttgattgttgtattcctgtatctctagataagttagtcatatagtcccttccggcgatacgttttttccaagcccgaaattgattagccaaatgtgtatttatttttgtgatattgatataatatttcggataatgcatactgttagtcttatatcatttggttcatctatgtattgtaatattgttacatgatctatagatgatgtattgattttggcaggatcgaattccatatccgcgactaaacagtgaaaaaaatgtaaatactttttaaattttaaattagtaaaacttttttttattttttatgattccaaaaatactgaatacaaagtcctaaattataaatatggagatcatactaccacaacttattattatgtatacaaggccggtgtaatagatagatatatataattctattacaccggcagacaattaccgaccggtatttgtcgttaccaacataccgtataatatgtaatatacaattccataacccattgacagttgttatacatcaaaattgcaattcttttgattacgatgttataagaatgtagttaattgatgtatgatgttaatgtgtcctctttcctcttataacatcgtaatcaaaaacttttttataatatatacctaataatgtgtcttaatagttctcgtgattcgtcaaacaatcattcttataaaatataataaagcaacgtaaaaacacataaaaataagcgtaactaataagacaatggatatttacgacgataaaggtctacagactattaaactgtttaataatgaatttgattgtataaggaatgacatcagagaattatttaaacatgtaactgattccgatagtatacaacttccgatggaagacaattctgatattatagaaaatatcagaaaaatactatatagacgattaaaaaatgtagaatgtgttgacatcgataacacaataacttttatgaaatacgatccaaatgatgataataagcgtacgtgttctaattgggtacccttaactaataactatatggaatattgtctagtaatatatttggaaacaccgatatgtggaggcaaaataaaattataccaccctacaggaaatataaagtcggataaggatattatgtttgcaaagactctagactttaaatcaacgaaagtgttaactggacgtaaaacaattgccgttctagacatatccgtttcatataatagatcaatgactactattcactacaacgacgacgttgatatagatatacatactgataaaaatggaaaagagttatgttattgttatataacaatagatgatcattacttggttgatgtggaaactataggagttatagtcaatagatctggaaaatgtctgttagtaaataaccatctaggtataggtatcgttaaagataaacgtataagcgatagttttggagatgtatgtatggatacaatatttgacttttctgaagcacgagagttattttcattaactaatgatgataacaggaatatagcatgggacactgataaactagacgatgatacagatatatggactcccgtcacagaagatgattacaaatttctttctagactagtattgtatgcaaaatctcaatcggatactgtatttgactattatgttcttactggtgatacggaaccacccactgtattcattttcaaggtaactagattttactttaatatgccgaaataaaaaatttttgtataatatctagaggtagaggtattgtttagataaatacaaataacatagatacatcgcatacttagcatttttataaatatacataagacatacactttatacatttttgtaaaaatactcataaaaaaatttataaaaattatggcacaaccatatcttgtataggtagtttagttcgtcgagtgaacctataaacagataatagacaacacataataatgcctactaatacaagcataataccgggagatgggatatatgacgttgtagtgtttgggttttctgaacgttgatagtctactaatactacatgctgacatctaatgcctgtataaccatgagagcatctacaatacataccgtcaatatctctagcgtggatacagtcaccgtgtaaacaatatccatctccctctggaccgcataatctgatagctggaatatctgttgtagcgtttgtaatttctggcaatgtcgtttcgatagcgttaccactatcggcgaatgatctgattatcatagcagcgaacaacaacatcagataatttatcaacatttttgatggattctgtgtttatgctgtttctcagtgtgtgtttatgacaagattgggaattttatattattaattcagtaatataaactaataatatattgttaattgtgtaaataatataaaaataacaatacaatattgaatgtgttgctgttaaaaatgtatgtgttaatataatagaataaaataaatgagtatgatcattttagataacgattgattttatcattaccgcttcattcttatattctttgcttacggaacctatatttagaaacatctactaacaattttttatgcttgcattattaatggtatgtaatatgattgattgtgtacgcaataccaatttgttaagtatgaatacggggtacaaacataaattgaaatttaacattatttatttatgatatatatcgttatcgttaggtctataccatggatatctttaaagaactaatcttaaaacaccctgatgaaaatgttttgatttctccagtttccattttatctactttatctattctaaatcatggagcagctggttctacagctgaacaactatcaaaatatatagagaatatgaatgagaatacacccgatgacaataatgatgacatggaggtagatattccgtattgtgcgacactagctaccgcaaataaaatatacggtagcgatagtatcgagttccacgcctccttcctacaaaaaataaaagacgattttcaaactgtaaactttaataatgctaaccaaacaaaggaactaatcaacgaatgggttaagacaatgacaaatggtaaaattaattccttattgactagtccgctatccattaatactcgtatgacagttgttagcgccgtccattttaaagcaatgtggaaatatccattttctaaacatcttacatatacagacaagttttatatttctaagaatatagttaccagcgttgatatgatggtgggtaccgagaataacttgcaatatgtacatattaatgaattattcggaggattctctattatcgatattccatacgagggaaactctagtatggtaattatactaccggacgacatagaaggtatatataacatagaaaaaaatataacagatgaaaaatttaaaaaatggtgtggtatgttatctactaaaagtatagacttgtatatgccaaagtttaaagtggaaatgacagaaccgtataatctggtaccgattttagaaaatttaggacttactaatatattcggatattatgcagattttagcaagatgtgtaatgaaactatcactgtagaaaaatttctacatacgacgtttatagatgttaatgaggagtatacagaagcatcggccgttacaggagtatttacgattaacttttcgatggtatatcgtacgaaggtctacataaaccatccattcatgtacatgattaaagacaccacaggacgtatactttttatagggaaatactgctatccgcaataaatataaacaaatagacttttataaagagtcttcaacgataagtatatcgacatactacttatgctgcgaaagattctgaacgagaacgactatctcaccctcttggatcatatccgcactgctaaatactaaatctccactacactttttatcatcttatgaggaatgattgccttcgtgaaataggaataattagcaccagaatagctatggattattgtggtagagagtgcactattctatgtcgtctactggatgaagatgtgacgtacaaaaaaataaaactagaaattgaaacgtgtcacaacttatcaaaacatatagatagacgaggaaacaatgcgctacattgttacgtctccaataaatgcgatacagacattaagattgttctctcgcggagtcgagagactttgtagaaacaacgaaggattaactccgctaggagtatacagtaagcatagatacgtaaaatctcagattgtgcatctactgatatccagctattcaaattcctctaacgaactcaagtcgaatataaatgatttcgatctgtattcggataatatcgacttacgtctgctaaaatacctaattgtggataaacggatacgtccgtccaagaatacgaattatgcaatcaatggtctcggattggtggatatatacgtaacgacgcctaatccgagaccagaagtattgctatggcttcttaaatcagaatgttacagcaccggttacgtatttcgtacctgtatgtacgacagtgatatgtgtaagaactctcttcattactatatatcgtctcatagagaatctcaatctctatccaaggatgtaattaaatgtttgatcgataacaatgtttccatccatggcagagacgaaggaggatctttacccatccaatactactggtctttctcaaccatagatatagagattgttaaattattattaataaaggatgtggacacgtgtagagtatacgacgtcagccctatattagaggcgtattatctaaacaagcgatttagagtaaccccatataatgtagacatggaaatcgttaatcttcttattgagagacgtcatactcttgtcgacgtaatgcgtagtattacttcgtacgattccagagaatataaccactacatcatcgataacattctaaagagatttagacaacaggatgaatccatcgtacaagccatactgataaactacttacattacggcgatatggtcgttcgatgcatgttagataacggacaacaactatcctctacacgactactttgttaataataatctcgtcgatgtaaacgtcgtaaggtttatcgtggaaaatatggacacgcggctgtaaatcacgtatcgaacaatggccgtctatgtatgtacggtctgatattatcgagatttaataattgcgggtatcactgttatgaaaccatactgatagatgtatttgatatactaagcaagtacatggatgatatagatatgatcgataactctactatattacgcggtcgatgtcaataatatacaatttgcaaagcggttattggaatatggagcgagtatcacgctcgataatcaatacggccatccagaaaagcagttacagaagagaaaacaaaacgaaatcgttgttctacaagatgtctctccctacgacgattactacgtaaaaaagatactagcctactgcctattaagggacgagtcattcgcggaactacatagtaaattctgtttaaacgaggactataaaagtgtatttatgaaaaatatatcattcgataagatagattccatcatcgtgacataagtcgcctcaaagagattcgaatctccgacaccgacctgtatacggtatcacagctatcttaaagccatacattcagacagtcacatttcatttcccatgtacgacgatctcatagaacagtgccatctatcgatggagcgtaaaagtaaactcgtcgacaaagcactcaataaattagagtctaccatcggtcaatctagactatcgtatttgcctccggaaattatgcgcaatatcatctaaacagtatgttgtacggaaagaaccattacaaatattatccatgatagaaagaaaatatctatatgattggagaagtaggaaacaggaacaagacaacgattactacattattaaatcatgaagtccgtattatactcgtatatattgtttctctcatgtataataataaacggaagagatatagcaccgcatgcaccatccgatggaaagtgtaaagacaacgaatacaaacgccataatttgtgtccgggaacatacgcttccagattatgcgatagcaagactaacacacgatgtacgccgtgtggttcgggtaccttcacatctcgcaataatcatttacccgcttgtctaagttgtaacggaagacgcgatcgtgtaacacgactcacaatagaatctgtgaatgctctcccggatattattgtcttctcaaaggatcatccggatgcaaggcatgtgtttcccaaacaaaatgtggaataggatacggagtatccggagacgtcatctgttctccgtgtggtctcggaacatattctcacaccgtctcttccgcagataaatgcgaacccgtacccagaaatacgtttaactatatcgatgtggaaattaacctgtatccagttaacgacacgtcgtgtactcggacgaccactaccggtctcagcgaatccatctcaacgtcggaactaactattactatgaatcataaagactgtaatcccgtatttcgtgatggatacttctccgttcttaataaggtagcgacttcaggtttctttacaggagaaaggtgtgcactctgaatttcgagattaaatgcaataacaaagattcttcctccaaacagttaacgaaagcaaagaatgatactatcatgccgcattcggagacagtaactctagtgggcgacatctatatactatatagtaataccaatactcaagactacgaaactgatacaatctcttatcatgtgggtaatgttctcgatgtcgatagccatatgcccggtagttgcgatatacataaactgatcactaattccaaacccacccactttttatagtaagtttttcacccataaataataaatacaataattaatttctcgtaaaagtagaaaatatattctaatttattgcacggtaaggaagtagaatcataaagaacagtactcaatcaatagcaattatgaaacaatatatcgtcctggcatgcatgtgcctggcggcagctgctatgcctgccagtcttcagcaatcatcctcatcctcctcctcgtgtacggaagaagaaaacaaacatcatatgggaatcgatgttattatcaaagtcacaaagcaagaccaaacaccgaccaatgataagatttgccaatccgtaacggaaattacagagtccgagtcagatccagatcccgaggtggaatcagaagatgattccacatcagtcgaggatgtagatcctcctaccacttattactccatcatcggtggaggtctgagaatgaactttggattcaccaaatgtcctcagattaaatccatctcagaatccgctgatggaaacacagtgaatgctagattgtccagcgtgtccccaggacaaggtaaggactctcccgcgatcactcatgaagaagctcttgctatgatcaaagactgtgaagtgtctatcgacatcagatgtagcgaagaagagaaagacagcgacatcaagacccatccagtactcgggtctaacatctctcataagaaagtgagttacgaagatatcatcggttcaacgatcgtcgatacaaaatgcgtcaagaatctagagtttagcgttcgtatcggagacatgtgcaaggaatcatctgaacttgaggtcaaggatggattcaagtatgtcgacggatcggcatctgaaggtgcaaccgatgatacttcactcatcgattcaacaaaactcaaagcgtgtgtctgaatcgataactctattcatctgaaattggatgagtagggttaatcgaacgattcaggcacaccacgaattaaaaaagtgtaccggacactatattccggtttgcaaaacaaaaatgttcttaactacattcacaaaaagttacctctcgcgacttcttctttttctgtctcaatagtgtgatacgattatgacactattcctattcctattcctatttcctttcagagtatcacaaaaatattaaacctctttctgatggtctcataaaaaaagttttacaaaaatatttttattctctttctctctttgatggtctcataaaaaaagttttacaaaaatatttttattctctttctctctttgatggtctcataaaaaaagttttacaaaaatatttttattctctttctctctttgatggtctcataaaaaaagttttacaaaaatatttttattctctttctctctttgatggtctcataaaaaaagttttacaaaaatatttttattctctttctctctttgatggtctcataaaaaaagttttacaaaaatatttttattctctttctctctttgatggtctcataaaaaaagttttacaaaaatatttttattctctttctctctttgatggtctcataaaaaaagttttacaaaaatatttttattctctttctctctttgatggtctcataaaaaaagttttacaaaaatatttttattctctttctctctttgatggtctcataaaaaaagttttacaaaaatatttttattctctttctctctttgatggtctcataaaaaaagttttacaaaaatatttttattctctttctctctttgatggtctcataaaaaaagttttacaaaaatatttttattctctttctctctttgatggtctcataaaaaagttttacaaaaatatttttattctctttctctctttgatggtctcataaaaaagttttacaaaaatatttttattctctttctctctttgatggtctcataaaaaaagttttacaaaaatatttttattctctttctctctttgatggtctcataa

SEQ ID NO: 19 - DNA, 201446 bp, Artificial Sequence
  GLV-1h188
ttatgagaccatcaaagagagaaagagaataaaaatatttttgtaaaactttttttatgagaccatcaaagagagaaagagaataaaaatatttttgtaaaacttttttatgagaccatcaaagagagaaagagaataaaaatatttttgtaaaacttttttatgagaccatcaaagagagaaagagaataaaaatatttttgtaaaactttttttatgagaccatcaaagagagaaagagaataaaaatatttttgtaaaactttttttatgagaccatcaaagagagaaagagaataaaaatatttttgtaaaactttttttatgagaccatcaaagagagaaagagaataaaaatatttttgtaaaactttttttatgagaccatcaaagagagaaagagaataaaaatatttttgtaaaactttttttatgagaccatcaaagagagaaagagaataaaaatatttttgtaaaactttttttatgagaccatcaaagagagaaagagaataaaaatatttttgtaaaactttttttatgagaccatcaaagagagaaagagaataaaaatatttttgtaaaactttttttatgagaccatcaaagagagaaagagaataaaaatatttttgtaaaactttttttatgagaccatcaaagagagaaagagaataaaaatatttttgtaaaactttttttatgagaccatcaaagagagaaagagaataaaaatatttttgtaaaactttttttatgagaccatcaaagagagaaagagaataaaaatatttttgtaaaactttttttatgagaccatcagaaagaggtttaatatttttgtgatactctgaaaggaaataggaataggaataggaatagtgtcataatcgtatcacactattgagacagaaaaagaagaagtcgcgagaggtaactttttgtgaatgtagttaagaacatttttgttttgcaaaccggaatatagtgtccggtacacttttttaattcgtggtgtgcctgaatcgttcgattaaccctactcatccaatttcagatgaatagagttatcgattcagacacacgctttgagttttgttgaatcgatgagtgaagtatcatcggttgcaccttcagatgccgatccgtcgacatacttgaatccatccttgacctcaagttcagatgattccttgcacatgtctccgatacgaacgctaaactctagattcttgacgcattttgtatcgacgatcgttgaaccgatgatatcttcgtaactcactttcttatgagagatgttagacccgagtactggatgggtcttgatgtcgctgtctttctcttcttcgctacatctgatgtcgatagacacttcacagtctttgatcatagcaagagcttcttcatgagtgatcgcgggagagtccttaccttgtcctggggacacgctggacaatctagcattcactgtgtttccatcagcggattctgagatggatttaatctgaggacatttggtgaatccaaagttcattctcagacctccaccgatgatggagtaataagtggtaggaggatctacatcctcgactgatgtggaatcatcttctgattccacctcgggatctggatctgactcggactctgtaatttccgttacggattggcaaatcttatcattggtcggtgtttggtcttgctttgtgactttgataataacatcgattcccatatgatgtttgttttcttcttccgtacacgaggaggaggatgaggatgattgctgaagactggcaggcatagcagctgccgccaggcacatgcatgccaggacgatatattgtttcataattgctattgattgagtactgttctttatgattctacttccttaccgtgcaataaattagaatatattttctacttttacgagaaattaattattgtatttattatttatgggtgaaaaacttactataaaaagtgggtgggtttggaattagtgatcagtttatgtatatcgcaactaccgggcatatggctatcgacatcgagaacattacccacatgataagagattgtatcagtttcgtagtcttgagtattggtattactatatagtatatagatgtcgcccactagagttactgtctccgaatgcggcatgatagtatcattctttgctttcgttaactgtttggaggaagaatctttgttattgcatttaatctcgaaattcagagtgcacacctttctcctgtaaagaaacctgaagtcgctaccttattaagaacggagaagtatccatcacgaaatacgggattacagtctttatgattcatagtaatagttagttccgacgttgagatggattcgctgagaccggtagtggtcgtccgagtacacgacgtgtcgttaactggatacaggttaatttccacatcgatatagttaaacgtatttctgggtacgggttcgcatttatctgcggaagagacggtgtgagaatatgttccgagaccacacggagaacagatgacgtctccggatactccgtatcctattccacattttgtttgggaaacacatgccttgcatccggatgatcctttgagaagacaataatatccgggagagcattcacagattctattgtgagtcgtgttacacgatcgcgtcttccgttacaacttagacaagcgggtaaatgattattgcgagatgtgaaggtacccgaaccacacggcgtacatcgtgtgttagtcttgctatcgcataatctggaagcgtatgttcccggacacaaattatggcgtttgtattcgttgtctttacactttccatcggatggtgcatgcggtgctatatctcttccgtttattattatacatgagagaaacaatatatacgagtataatacggacttcatgatttaataatgtagtaatcgttgtcttgttcctgtttcctacttctccaatcatatagatattttctttctatcatggataatatttgtaatggttctttccgtacaacatactgtttagatgatattgcgcataatttccggaggcaaatacgatagtctagattgaccgatggtagactctaatttattgagtgctttgtcgacgagtttacttttacgctccatcgatagatggcactgttctatgagatcgtcgtacatgggaaatgaaatgtgactgtctgaatgtatggctttaagatagctgtgataccgtatacaggtcggtgtcggagattcgaatctctttgaggcgacttatgtcacgatgatggaatctatcttatcgaatgatatatttttcataaatacacttttatagtcctcgtttaaacagaatttactatgtagttccgcgaatgactcgtcccttaataggcagtaggctagtatcttttttacgtagtaatcgtcgtagggagagacatcttgtagaacaacgatttcgttttgttttctcttctgtaactgcttttctggatggccgtattgattatcgagcgtgatactcgctccatattccaataaccgctttgcaaattgtatattattgacatcgaccgcgtaatatagtagagttatcgatcatatctatatcatccatgtacttgcttagtatatcaaatacatctatcagtatggtttcataacagtgatacccgcaattattaaatctcgataatatcagaccgtacatacatagacggccattgttcgatacgtgatttacagccgcgtgtccatattttccacgataaaccttacgacgtttacatcgacgagattattattaacaaagtagtcgtgtagaggatagttgttgtccgttatctaacatgcatcgaacgaccatatcgccgtaatgtaagtagtttatcagtatggcttgtacgatggattcatcctgttgtctaaatctctttagaatgttatcgatgatgtagtggttatattctctggaatcgtacgaagtaatactacgcattacgtcgacaagagtatgacgtctctcaataagaagattaacgatttccatgtctacattatatggggttactctaaatcgcttgtttagataatacgcctctaatatagggctgacgtcgtatactctacacgtgtccacatcctttattaataataatttaacaatctctatatctatggttgagaaagaccagtagtattggatgggtaaagatcctccttcgtctctgccatggatggaaacattgttatcgatcaaacatttaattacatccttggatagagattgagattctctatgagacgatatatagtaatgaagagagttcttacacatatcactgtcgtacatacaggtacgaaatacgtaaccggtgctgtaacattctgatttaagaagccatagcaatacttctggtctcggattaggcgtcgttacgtatatatccaccaatccgagaccattgattgcataattcgtattcttggacggacgtatccgtttatccacaattaggtattttagcagacgtaagtcgatattatccgaatacagatcgaaatcatttatattcgacttgagttcgttagaggaatttgaatagctggatatcagtagatgcacaatctgagattttacgtatctatgcttactgtatactcctagcggagttaatccttcgttgtttctacaaagtctctcgactccgcgagagaacaatcttaatgtctgtatcgcatttattggagacgtaacaatgtagcgcattgtttcctcgtctatctatatgttttgataagttgtgacacgtttcaatttctagttttatttttttgtacgtcacatcttcatccagtagacgacatagaatagtgcactctctaccacaataatccatagctattctggtgctaattattcctatttcacgaaggcaatcattcctcataagatgataaaaagtgtagtggagatttagtatttagcagtgcggatatgatccaagagggtgagatagtcgttctcgttcagaatctttcgcagcataagtagtatgtcgatatacttatcgttgaagactctttataaaagtctatttgtttatatttattgcggatagcagtatttccctataaaaagtatacgtcctgtggtgtctttaatcatgtacatgaatggatggtttatgtagaccttcgtacgatataccatcgaaaagttaatcgtaaatactcctgtaacggccgatgcttctgtatactcctcattaacatctataaacgtcgtatgtagaaatttttctacagtgatagtttcattacacatcttgctaaaatctgcataatatccgaatatattagtaagtcctaaattttctaaaatcggtaccagattatacggttctgtcatttccactttaaactttggcatatacaagtctatacttttagtagataacataccacaccattttttaaatttttcatctgttatatttttttctatgttatatataccttctatgtcgtccggtagtataattaccatactagagtttccctcgtatggaatatcgataatagagaatcctccgaataattcattaatatgtacatattgcaagttattctcggtacccaccatcatatcaacgctggtaactatattcttagaaatataaaacttgtctgtatatgtaagatgtttagaaaatggatatttccacattgctttaaaatggacggcgctaacaactgtcatacgagtattaatggatagcggactagtcaataaggaattaattttaccatttgtcattgtcttaacccattcgttgattagttcctttgtttggttagcattattaaagtttacagtttgaaaatcgtcttttattttttgtaggaaggaggcgtggaactcgatactatcgctaccgtatattttatttgcggtagctagtgtcgcacaatacggaatatctacctccatgtcatcattattgtcatcgggtgtattctcattcatattctctatatattttgatagttgttcagctgtagaaccagctgctccatgatttagaatagataaagtagataaaatggaaactggagaaatcaaaacattttcatcagggtgttttaagattagttctttaaagatatccatggtatagacctaacgataacgatatatatcataaataaataatgttaaatttcaatttatgtttgtaccccgtattcatacttaacaaattggtattgcgtacacaatcaatcatattacataccattaataatgcaagcataaaaaattgttagtagatgtttctaaatataggttccgtaagcaaagaatataagaatgaagcggtaatgataaaatcaatcgttatctaaaatgatcatactcatttattttattctattatattaacacatacatttttaacagcaacacattcaatattgtattgttatttttatattatttacacaattaacaatatattattagtttatattactgaattaataatataaaattcccaatcttgtcataaacacacactgagaaacagcataaacacagaatccatcaaaaatgttgataaattatctgatgttgttgttcgctgctatgataatcagatcattcgccgatagtggtaacgctatcgaaacgacattgccagaaattacaaacgctacaacagatattccagctatcagattatgcggtccagagggagatggatattgtttacacggtgactgtatccacgctagagatattgacggtatgtattgtagatgctctcatggttatacaggcattagatgtcagcatgtagtattagtagactatcaacgttcagaaaacccaaacactacaacgtcatatatcccatctcccggtattatgcttgtattagtaggcattattatgtgttgtctattatctgtttataggttcactcgacgaactaaactacctatacaagatatggttgtgccataatttttataaatttttttatgagtatttttacaaaaatgtataaagtgtatgtcttatgtatatttataaaaatgctaagtatgcgatgtatctatgttatttgtatttatctaaacaatacctctacctctagatattatacaaaaattttttatttcggcatattaaagtaaaatctagttaccttgaaaatgaatacagtgggtggttccgtatcaccagtaagaacataatagtcaaatacagtatccgattgagattttgcatacaatactagtctagaaagaaatttgtaatcatcttctgtgacgggagtccatatatctgtatcatcgtctagtttatcagtgtcccatgctatattcctgttatcatcattagttaatgaaaataactctcgtgcttcagaaaagtcaaatattgtatccatacatacatctccaaaactatcgcttatacgtttatctttaacgatacctatacctagatggttatttactaacagacattttccagatctattgactataactcctatagtttccacatcaaccaagtaatgatcatctattgttatataacaataacataactcttttccatttttatcagtatgtatatctatatcaacgtcgtcgttgtagtgaatagtagtcattgatctattatatgaaacggatatgtctagaacggcaattgttttacgtccagttaacactttcgttgatttaaagtctagagtctttgcaaacataatatccttatccgactttatatttcctgtagggtggtataattttattttgcctccacatatcggtgtttccaaatatattactagacaatattccatatagttattagttaagggtacccaattagaacacgtacgcttattatcatcatttggatcgtatttcataaaagttattgtgttatcgatgtcaacacattctacattttttaatcgtctatatagtatttttctgatattttctataatatcagaattgtcttccatcggaagttgtatactatcggaatcagttacatgtttaaataattctctgatgtcattccttatacaatcaaattcattattaaacagtttaatagtctgtagacctttatcgtcgtaaatatccattgtcttattagttacgcttatttttatgtgtttttacgttgctttattatattttataagaatgattgtttgacgaatcacgagaactattaagacacattattaggtatatattataaaaaagtttttgattacgatgttataagaggaaagaggacacattaacatcatacatcaattaactacattcttataacatcgtaatcaaaagaattgcaattttgatgtataacaactgtcaatgggttatggaattgtatattacatattatacggtatgttggtaacgacaaataccggtcggtaattgtctgccggtgtaatagaattatatatatctatctattacaccggccttgtatacataataataagttgtggtagtatgatctccatatttataatttaggactttgtattcagtatttttggaatcataaaaaataaaaaaaagttttactaatttaaaatttaaaaagtatttacatttttttcactgtttagtcgcggatatggaattcgatcctgccaaaatcaatacatcatctatagatcatgtaacaatattacaatacatagatgaaccaaatgatataagactaacagtatgcattatccgaaatattatatcaatatcacaaaaataaatacacatttggctaatcaatttcgggcttggaaaaaacgtatcgccggaagggactatatgactaacttatctagagatacaggaatacaacaatcaaaacttactgaaactatacgtaactgtcaaaaaaatagaaacatatatggtctatatatacactacaatttagttattaattggataaccgatgtgattatcaatcaatattaagagggttggtaaattggtacatagctaataatacctatactccaaatacacccaataatacaacaaccatttctgagttggatatcatcaaaatactaaataaatacgaggacgtgtatagagtaagtaaagaaaaagaatgtggaatttgctatgaagttgtttactcaaaacgatagatactttggtttattggattcgtgtactcatatattttgcataacatgcatcaatatatggcatagaacacgaagagaaaccggtgcgtcggataattgtcctatatgccgtacccgttttagaaacataacaatgagcaagttctataagctagttaactaataaataaaaagtttaatttgttgacgacgtatgtcgttattttttctcgtataaaagattaatttgattctaatataatctttagtattggataaatatcaattcaaattaattccattagattatatcataaataaaaatagtagcacacaactacttcagcaaacattctttttataaatgccatctagcgtagcgaggacacaagtgaacctataattatcaaatttattagtatcagtcacatgaaggactttacgtagagtgacgattccactatctgtggtacgaacggtttcatcttctttgatgccatcacccagatgttctataaacttggtatcctcgtccgatttcatatcctttgccaaccaatacatatagctaaactcaggcatatgttccacacatcctgaacaatgaaattctccagaagatgttacaatgtctagatttggacatttggtttcaaccgcgttaacatatgagtgaacacacccatacatgaaagcgatgagaaataggattctcatcttgccaaaatatcactagaaaaaatttatttatcagttttaaaggtataaaaaatacttattgttgctcgaatattttgtatttgatggtatacggaagattagaaatgtaggtattatcatcaactgattctatggttttatgtattctatcatgtttcactattgcgttggaaataatatcatatgcttccacatatattttattttgttttaactcataatactcacgtaattctggattattggcatatctatgaataattttagctccatgatcagtaaatattaatgagaacatagtattaccacctaccattatttttttcatctcattcaattcttaattgcaaagatctatataatcattatagcgttgacttatggactctggaatcttagacgatgtacagtcatctataatcatggcatatttaatacattgttttatagcatagtcgttatctacgatgttagatatttctctcaatgaatcaatcacacaatctaatgtaggtttatgacataatagcattttcagcagttcaatgtttttagattcgttgatggcaatggctatacatgtatatccgttatttgatctaatgttgacatctgaaccggattctagcagtaaagatactagagattgtttattatatctaacagccttgtgaagaagtgtttctcctcgtttgtcaatcatgttaatgtctttaagataaggtaggcaaatgtttatagtactaagaattgggcaagcataagacatgtcacaaagacccttttttgtatgtataagtgtaaaaattataacatccatagttggatttacataggtgtccaatcgggatctctccatcatcgagataattgatggcatctcccttccttttttagtagatatttcatcgtgtaagaatcaatattaatatttctaaagtatccgtgtatagcctctttatttaccacagctccatattccactagagggatatcgccgaatgtcatatactcaattagtatatgttggaggacatccgagttcattgttttcaatatcaaagagatggtttccttatcatttctccatagtggtacaatactacacattattccgtgcggctttccattttccaaaaacaatttgaccaaatctaaatctacatctttattgtatctataatcactatttagataatcagccataattcctcgagtgcaacatgttagatcgtctatatatgaataagcagtgttatctattcctttcattaacaatttaacgatgtctatatctatatgagatgacttaatataatattgaagagctgtacaatagtttttatctataaaagacggcttgattccgtgattaattagacatttaacaacttccggacgcacatatgctctcgtatccgactctgaatacagatgagagatgatatacagatgcaatacggtaccgcaatttcgtagttgataatcatcatacgcgtatcagtactcgtcctcataaagaacactgcagccattttctatgaacaaatcaataattttagaaacaggatcattgtcattacataattttctataactgaacgatggttttcacatttaacactcaagtcaaatccatgttctaccaacacctttatcaagtcaacgtctacatttttggatttcatatagctgaatatattaaagttatttatgttgctaaatccagtggcttctagtagagccatcgctatatccttattaactttaacatgtctactatttgtgtattcttctaatggggtaagctgtctccaatttttgcgtaatggattagtgccactgtctagtagtagtttgacgacctcgacattattacaatgctcattaaaaaggtatgcgtgtaaagcattattcttgaattggttcctggtatcattaggatctctgtctttcaacatctgtttaagttcatcaagagccacctcctcattttccaaatagtcaaacattttgactgaatgagctactgtgaactctatacacccacacaactaatgtcattaaatatcatgtcaaaaacttgtacaattattaataaaaataatttagtgtttaaattttaccagttccagattttacacctccgttaatacctccattaaccccactggacgatcctcctccccacattccaccgccaccagatgtataagttttagatcctttattactaccatcatgtccatggataaagacactccacatgccgccactaccccctttagaagacatattaataagacttaaggacaagtttaacaataaaattaatcacgagtaccctactaccaacctacactattatatgattatagtttctatttttacagtaccttgactaaagtttctagtcacaagagcaatactaccaacctacactattatatgattatagtttctatttttataggaacgcgtacgagaaaatcaaatgtctaatttctaacggtagtgttgataaacgattgttatccgcggatacctcctctatcatgtcgtctattttcttactttgttctattaacttattagcattatatattatttgattataaaacttatattgcttattagcccaatctgtaaatatcggattattaacatatcgtttctttgtaggtttatttaacatgtacatcactgtaagcatgtccttaccatttattttaatttgacgcatatccgcaatttctttttcgcagtcggttataaattctatatatgatggatacatgctacatgtgtacttataatcgactaatatgaagtacttgatacatattttcagtaacgatttattattaccacctatgaataagtacctgtgatcgtctaggtaatcaactgttttcttaatacattcgatggttggtaatttactcagaataatttccaatatcttaatatataattctgctatttctgggatatatttatctgccagtataacacaaatagtaatacatgtaaacccatattttgttattatattaatgtctgcgccattatctattaaccattctactaggctgacactatgcgactcaatacaatgataaagtatactacatccatgtttatctattttgtttatatcatcaatatacggcttacaaagttttagtatcgataacacatccaactcacgcatagagaaggtagggaataatggcataatatttattaggttatcatcattgtcattatctacaactaagtttccattttttaaaatatactcgacaactttaggatctctattgccaaatttttgaaaatatttatttatatgcttaaatctatataatgtagctccttcatcaatcatacatttaataacattgatgtatactgtatgataagatacatattctaacaatagatcttgtatagaatctgtatatcttttaagaattgtggatattaggatattattacataaactattacacaattctaaaatataaaacgtatcacggtcgaataatagttgatcaactatataattatcgattttgtgatttttcttcctaaactgtttacgtaaatagttagatagaatattcattagttcatgaccactatagttactatcgaataacgcgtcaaatatttcccgtttaatatcgcatttgtcaagataataatagagtgtggtatgttcacgataagtataataacgcatctctttttcgtgtgaaattaaatagtttattacgtccaaagatgtagcataaccatcttgtgacctagtaataatataataatagagaactgttttacccattctatcatcataatcagtggtgtagtcgtaatcgtaatcgtctaattcatcatcccaattataatattcaccagcacgtctaatctgttctattttgatcttgtatccatactgtatgttgctacatgtaggtattcctttatccaataatagtttaaacacatctacattgggatttgatgttgtagcgtatttttctacaatattaataccatttttgatactatttatttctatacctttcgaaattagtaatttcaataagtctatattgatgttatcagaacatagatattcgaatatatcaaaatcattgatatttttatagtcgactgacgacaataacaaaatcacaacatcgtttttgatattattatttttcttggtaacgtatgcctttaatggagtttcaccatcatactcatataatggatttgcaccactttctatcaatgattgtgcactgctggcatcgatgttaaatgttttacaactatcatagagtatcttatcgttaaccatgattggttgttgatgctatcgcattttttggtttctttcatttcagttatgtatggatttagcacgtttgggaagcatgagctcatatgatttcagtactgtagtgtcagtactattagtttcaataagatcaatctctagatctatagaatcaaaacacgataggtcagaagataatgaatatctgtaggcttcttgttgtactgtaacttctggttttgttagatggttgcatcgtgctttaacgtcaatggtacaaattttatcctcgctttgtgtatcatattcgtccctactataaaattgtatattcagattatcatgcgatgtgtatacgctaacggtatcaataaacggagcacaccatttagtcataaccgtaatccaaaaatttttaaagtatatcttaacgaaagaagttgtgtcattgtctacggtgtatggtactagatcctcataagtgtatatatctagagtaatgtttaatttattaaatggttgataatatggatcctcgtgacaatttccgaagatggaaataagacataaacacgcaataaatctaattgcggacatggttactccttaaaaaaatacgaataatcaccttggctatttagtaagtgtcatttaacactatactcatattaatccatggactcataatctctatacgggattaacggatgttctatatacggggatgagtagttctcttctttaactttatactttttactaatcatatttagactgatgtatgggtaatagtgtttgaagagctcgttctcatcatcagaataaatcaatatctctgtttttttgttatacagatgtattacagcctcatatattacgtaatagaacgtgtcatctaccttattaactttcaccgcatagttgtttgcaaatacggttaatcctttgacctcgtcgatttccgaccaatctgggcgtataatgaatctaaactttaattgcttgtaatcattcgaaataatttttagtttgcatccgtagttatcccctttatgtaactgtaaatttctcaacgcgatatctccattaataatgatgtcgaattcgtgctgtatacccatactgaatggatgaacgaataccgacggcgttaatagtaatttactttttcatctttacatattgggtactagttttactatcataagtttataaattccacaagctactatggaataagccaaccatcttagtataccacacatgtcttaaagtttattaattaattacatgttgttttatatatatcgctacgaatttaaagagaaattagtttaggaagaaaaattatctatctacatcatcacgtctctgtattctacgatagagtgctactttaagatgcgacagatccgtgtcatcaaatatatactccattaaaatgattattccggcagcgaacttgatattggatatatcacaacctttgttaatatctacgacaatagacagcagtcccatggttccataaacagtgagtttatctttctttgaagagatattttgtagagatcttataaaactgtcgaatgacatcgcatttatatctttagctaaatcgtatatgttaccatcgtaatatctaaccgcgtctatcttaaacgtttccatcgctttaaagacgtttccgatagatggtctcatttcatcagtcatactgagccaacaaatataatcgtgtataacatctttgatagaatcagactctaaagaaaacgaatcggctttattatacgcattcatgataaacttaatgaaaaatgtttttcgttgtttaagttggatgaatagtatgtcttaataattgttattatttcattaattaatatttagtaacgagtacactctataaaaacgagaatgacataactaatcataactagttatcaaagtgtctaggacgcgtaattttcatatggtatagatcctgtaagcattgtctgtattctggagctattttctctatcgcattagtgagttcagaatatgttataaatttaaatcgaataacgaacataactttagtaaagtcgtctatattaactcttttattttctagccatcgtaataccatgtttaagatagtatattctctagttactacgatctcatcgttgtctagaatatcacatactgaatctacatccaattttagaaattggtctgtgttacatatctcttctatattattgttgatgtattgtcgtagaaaactattacgtagaccattttctttataaaacgaatatatagtactccaattatctttaccgatatatttgcacacataatccattctctcaatcactacatctttaagattttcgttgttaagatatttggctaaactatataattctattagatcatcaacagaatcagtatatatttttctagatccaaagacgaactctttggcgtcctctataatattcccagaaaagatattttcgtgttttagtttatcgagatctgatctgttcatatacgccatgattgtacggtacgttatgataaccgcataaaataaaaatccattttcatttttaaccaatactattcataattgagattgatgtaatactttgttactttgaacgtaaagacagtacacggatccgtatctccaacaagcacgtagtaatcaaatttggtgttgttaaacttcgcaatattcatcaatttagatagaaacttatactcatcatctgttttaggaatccatgtattattaccactttccaacttatcattatcccaggctatgtttcgtccatcatcgttgcgcagagtgaataattcttttgtattcggtagttcaaatatatgatccatgcatagatcggcaaagctattgtagatgtgatttttcctaaatctaatataaaactcgtttactagcaaacactttcctgatttatcgaccaagacacatatggtttctaaatctatcaagtggtggggatccatagttatgacgcagtaacatatattattacattcttgactgtcgctaatatctaaatatttattgttatcgtattggattctgcatatagatggcttgtatgtcaaagatatagaacacataaccaatttatagtcgcgctttacattctcgaatctaaagttaagagatttagaaaacattatatcctcggatgatgttatcactgtttctggagtaggatatattaaagtctttacagatttcgtccgattcaaataaatcactaaataatatcccacattatcatctgttagagtagtatcattaaatctattatattttatgaaagatatatcactgctcacctctatatttcgtacatttttaaactgtttgtataatatctctctgatacaatcagatatatctattgtgtcggtagacgataccgttacatttgaattaatggtgttccattttacaacttttaacaagttgaccaattcatttctaatagtatcaaactctccatgattaaatattttaatagtatccattttatatcactacggacacaaagtagctgacataaaccattgtataatttttatgttttatgtttattagcgtacacattttggaagttccggcttccatgtatttcctggagagcaagtagatgatgaggaaccagatagtttatatccgtacttgcacttaaagtctacattgtcgttgtatgagtatgatcttttaaacccgctagacaagtatccgtttgatattgtaggatgtggacatttaacaatctgacacgtgggtggatcggaccattctcctcctgaacacaggacactagagttaccaatcaacgaatatccactattgcaactataagttacaacgctcccatcggtataaaaatcctcgtatccgttatgtcttccgttggatatagatggaggggattggcatttaacagattcacaaataggtgcctcgggattccataccatagatccagtagatcctaattcacaatacgatttagattcaccgatcaactgatatccgctattacaagagtacgttatactagagccaaagtctactccaccaatatcaagttggccattatcgatatctcgaggcgatgggcatctccgtttaatacattgattaaagagtgtccatccagtacctgtacatttagcatatataggtcccattttttgctttctgtatccaggtagacatagatattctatagtgtctcctatgttgtaattagcattagcatcagtctccacactattcttaaatttcatattaatgggtcgtgacggaatagtacagcatgatagaacgcatcctattcccaacaatgtcaggaacgtcacgctctccaccttcatatttatttatccgtaaaaatgttatcctggacatcgtacaaataataaaaagcccatatatgttcgctattgtagaaattgtttttcacagttgctcaaaaacgatggcagtgacttatgagttacgttacactttggagtctcatctttagtaaacatatcataatattcgatattacgagttgacatatcgaacaaattccaagtatttgattttggataatattcgtattttgcatctgctataattaagatataatcaccgcaagaacacacgaacatctttcctacatggttaaagtacatgtacaattctatccatttgtcttccttaactatatatttgtatagataattacgagtctcgtgagtaattccagtaattacatagatgtcgccgtcgtactctacagcataaactatactatgatgtctaggcatgggagacttttttatccaacgatttttagtgaaacattccacatcgtttaatactacatatttctcatacgtggtataaactccacccattacatatatatcatcgtttacgaataccgacgcgcctgaatatctaggagtaattaagtttggaagtcttatccatttcgaagtgccgtgtttcaaatattctgccacacccgttgaaatagaaaattctaatcctcctattacatataactttccatcgttaacacaagtactaacttctgattttaacgacgacatattagtaaccgttttccattttttcgttttaagatctacccgcgatacggaataaacatgtctattgttaatcatgccgccaataatgtatagacaattatgtaaaacatttgcattatagaattgtctatctgtattaccgactatcgtccaatattctgttctaggagagtaatgggttattgtggatatataatcagagtttttaatgactactatattatgttttataccatttcgtgtcactggctttgtagatttggatatagttaatcccaacaatgatatagcattgcgcatagtattagtcataaacttgggatgtaaaatgttgatgatatctacatcgtttggatttttatgtatccactttaataatatcatagctgtaacatcctcatgatttacgttaacgtcttcgtgggataagatagttgtcagttcatcctttgataattttccaaattctggatcggatgtcaccgcagtaatattgttgattatttctgacatcgacgcattatatagttttttaattccatatcttttagaaaagttaaacatccttatacaatttgtgaaattaatattatgaatcatagtttttacacatagatctactacaggcggaacatcaattattatggcagcaactagtatcatttctacattgtttatggtgatgtttatcttcttccagcgcatatagtctaatagcgattcaaacgcgtgatagtttataccattcaatataatcgcttcatcctttagatggtgatcctgaatgcgtttaaaaaaattatacggagacgccgtaataatttccttattcacttgtataatttccccattgatagaaaatattacgctttccattcttaaagtactataagtaattatagtataatgtaaacgtttatatattcaatatttttataaaaatcattttgacattaattcctttttaaatttccgtctatcatctatagaaacgtattctatgaatttataaaatgcttttacgtgtcctatcgtaggcgatagaaccgctaaaaagcctatcgaatttctacaaaagaatctgttatatggtatagggagagtataaaacattaaatgtccgtacttattaaagtattcagtagccaatcctaactctttcgaatacttattaatggctcttgttctgtacgaatctatttttttgaacaacggacctagtggtatatcttgttctatgtatctaaaataatgtctgactagatccgttagtttaatatccgcagtcatcttgtctagaatggcaaatctaactgcgggtttaggctttagtttagtttctatatctacatctatgtctttatctaacaccaaaaatataatagctaatattttattacaatcatccggatattcttctacgatctcactaactaatgtttctttggttatactagtatagtcactatcggacaaataaagaaaatcagatgatcgatgaataatacatttaaattcatcatctgtaagatttttgagatgtctcattagaatattattagggttagtactcattatcattcggcagctattacttattttattatttttcaccatatagatcaatcattagatcatcaaaatatgtttcaatcatcctaaagagtatggtgaatgactcttcccatctaatttctgaacgttcaccaatgtctctagccactttggcactaatagcgatcattcgcttagcgtcttctatattattaactggttgatttaatctatctagcaatggaccgtcggacagcgtcattctcatgttcttaatcaatgtacatacatcgccgtcatctaccaattcatccaacaacataagctttttaaaatcatcattataataggtttgatcgttgtcatttctccaaagaatatatctaataagtagagtcctcatgcttagttaacaactattttttatgttaaatcaattagtacaccgctatgtttaatacttattcatattttagtttttaggattgagaatcaatacaaaaattaatgcatcattaattttagaaatacttagtttccacgtagtcaatgaaacatttgaactcatcgtacaggacgttctcgtacaggacgtaactataaaccggtttatatttgttcaagatagatacaaatccgataactttttttacgaattctacgggatccactttaaaagtgtcataccgggttctttttatttttttaaacagatcaatggtgtgatgttgattaggtcttttacgaatttgatatagaatagcgtttacatattctccataatggtcaatcgccatttgttcgtatgtcataaattctttaattatatgacactgtgtattatttagttcatccttgttcattgttaggaatctatccaaaatggcaattatactagaactataggtgcgttgtatacacatattgatgtgtctgtttatacaatccatgatatttggatccatgctactaccttcgggtaaaattgtagcatcatataccatttctagtactttaggttcattattatccattgcagaggacgtcatgatcgaatcataaaaaaatatattatttttatgttattttgttaaaaataatcatcgaatacttcgtaagatactccttcatgaacataatcagttacaaaacgtttatatgaagtaaagtatctacgatttttacaaaagtccggatgcataagtacaaagtacgcgataaacggaataataatagatttatctagtctatctttttctatagctttcatagttagatacatggtctcagaagtaggattatgtaacatcagcttcgataaaatgactgggttatttagtcttacacattcgctcatacatgtatgaccgttaactacagagtctacactaaaatgattgaacaatagatagtctaccattgtttcgtattcagatagtacagcgtagtacatggcatcttcacaaattatatcattgtctaatagatatttgacgcatcttatggatcccacttcaacagccatcttaaaatcatattgctttcctttatcattaataatttctagaacatcatctctatcataaaagatacaaatattaactgtttgatccgtaataacattgctagtcaatagcaatttgttaataagatgcgctgggctcaatgtcttaataagaagtgtaagaggactatctccgaatttgttttgtttattaacatccgttgatggaagtaaaagatctataatgtctacattcttgactgttttagagcatacaatatggagaggtgtatttccatcatgatctggttttgagggactaattcctagtttcatcatccatgagattgtagaagcttttggattgtctgacataagatgtctatgaatatgatttttgccaaatttatccactatcctggcttcgaatccgatggacattatttttttaaacactctttctgaaggatctgtacacgccaacaacggaccacatccttcttcatcaaccgagttgttaatcttggctccatactgtaccaataaatttattctctctatgacttcatcatctgttcccgagagataatatagaggtgttttatgctgtttatcacacgcgtttggatctgcgccgtgcgtcagcagcatcgcgactattctattattattaattttagaagctatatgcaatggataatttccatcatcatccgtctcatttggagagtatcctctatgaagaagttcttcgacaaatcgttcatctagtcctttaattccacaatacgcatgtagaatgtgataattatttccagaaggttcgatagcttgtagcatattcctaaatacatctaaatttttactattatatttggcataaagagatagataatactcggccgacataatgttgtccattgtagtataaaaattaatatttctatttctatttctgtatatttgcaacaatttactctctataacaaatatcataacttagtttttttatgtcaagaaggcactggtttagttcatctataaatgtcacgccataactaccacgcatgccatactcagaattatgataaagatatttatccttggggtgtaggtaatggggattaatctttgttggatcagtctctaagttaacacatgtcacacatgatccatttatagttatatcacacgatgatgatttatgaattgattccggaagatcgctatcgtattttgtggttccacaattcatttccatacatgttattgtcacactaatattatgatgaactttatctagccgctgagtggtaaacaacagaacagatagtttattatctttaccaacaccctcagccgctgccacaaatctctgatccgtatccatgatggtcatgtttatttctagtccgtatccagtcaacactatgttagcatttctgtcgatatagctttcactcatatgacactcaccaataatagtagaattaatgtcgtaatttacaccaatagtgagttcggcggcaaagtaccaataccggtaatcttgtcgaggaggacatatagtattcttgtattctaccgaatacccgagagatgcgatacaaaagagcaagactaatttgtaaaccatcttactcaaaatatgtaacaatagtacgatgcaatgagtaagacaataggaaatctatcttatatacacataattattctatcaattttaccaattagttagtgtaatgttaacaaaaatgtgggagaatctaattagtttttctttacacaattgacgtacatgagtctgagttccttgtttttgctaattatttcatccaatttattattcttgacgatatcgagatcttttgtataggagtcaaacttgtattcaacatgcttttctataatcattttagctatttcggcatcatccaatagtacattttccagattagcagaatagatattaatgtcgtatttgaacagagcctgtaacatctcaatgtctttattatctatagccaatttaatgtccggaatgaagagaagggaattattggtgtttgtcgacgtcatatagtcgagcaagagaatcatcatatccacgtgtccattttttatagtgatgtgaatacaactaaggagaatagccagatcaaaagtagatggtatctctgaaagaaagtaggaaacaatacttacatcattaagcatgacggcatgataaaatgaagttttccatccagttttcccatagaacatcagtctccaatttttcttaacaaacagttttaccgtttgcatgttaccactatcaaccgcataatacaatgcggtgtttcccttgtcatcaaattgtgaatcatccagtccactgaatagcaaaatctttactattttggtatcttccaatgtggctgcctgatgtaatggaaattcattctctagaagatttttcaatgctccagcgttcaacaacgtacatactagacgcacgttattatcagctattgcataatacaaggcactatgtccatggacatccgccttaaatgtatctttactagagagaaagcttttcagctgcttagacttccaagtattaattcgtgacagatccatgtctgaaacgagacgctaattagtgtatattttttcattttttataattttgtcatattgcaccagaattaataatatctttaatagatctgattagtagatacatggctatcgcaaaacaacatatacacatttaataaaaataatatttattaagaaaattcagatttcacgtacccatcaatataaataaaataatgattccttacaccgtacccatattaaggagattccaccttacccataaacaatataaatccagtaatatcatgtctgatgatgaacacaaatggtgtattaaattccagtttttcaggagatgatctcgccgtagctaccataatagtagatgcctctgctacagttccttgttcgtcgacatctatctttgcattctgaaacattttataaatatataatgggtccctagtcatatgtttaaacgacgcattatctggattaaacatactaggagccatcatttcggctatcgacttaatatccctcttattttcgatagaaaatttagggagtttaagattgtacactttattccctaattgagacgaccaatagtctaattttgcagccgtgatagaatctgtgaaatgggtcatattatcacctattgccaggtacatactaatattagcatccttatacggaaggcgtaccatgtcatattctttgtcatcgattgtgattgtatttccttgcaatttagtaactacgttcatcatgggaaccgttttcgtaccgtacttattagtaaaactagcattgcgtgttttagtgatatcaaacggatattgccatatacctttaaaatatatagtattaatgattgcccatagagtattattgtcgagcatattagaatctactacattagacataccggatctacgttctactatagaattaattttattaaccgcatctcgtctaaagtttaatctatataggccgaatctatgatattgttgataatacgacggtttaatgcacacagtattatctacgaaactttgataagttagatcagtgtacgtatatttagatgttttcagcttagctaatcctgatattaattctgtaaatgctggacccagatctctttttctcaaatccatagtcttcaataattctattctagtattacctgatgcaggcaatagcgacataaacatagaaaacgaataaccaaacggtgagaagacaatattatcatcttgaatatttttatacgctactataccggcattggtaaatccttgtagacgataggcggacgctgaacacgctaacgatagtatcaataacgcaatcatgattttatggtattaataattaaccttatttttatgttcggtataaaaaaattattgatgtctacacatccttttgtaattgacatctatatatccttttgtataatcaactctaatcactttaacttttacagttttccctaccagtttatccctatattcaacatatctatccatatgcatcttaacactctctgccaagatagcttcagagtgaggatagtcaaaaagataaatatatagagcataatcattctcgtatactctgccctttattacatcacccgcattgggcaacgaataacaaaatgcaagcatcttgttaacgggctcgtaaattgggataaaaattatgtttttattgtcttatatctattttattcaagagaatattcaggaatttctttttccggttgtatctcgtcgcagtatatatcatttgtacattgtttcatattttttaatagtttacaccttttagtaggactagtatcgtacaattcatagctgtattttgaattccaatcacgcataaaaatatcttccaattgttgacgaagacctaatccatcatccggtgtaatattaatagatgctccacatgtatccgtaaagtaatttcctgtccaatttgaggtacctatataggccgttttatcggttaccatatatttggcatggtttaccctagaatacggaatgggaggatcagcatctggtacaataaatagctttacttctatatttatgtttttagattttagcatagcgatagatcttaaaaagtttctcatgataaacgaagatcgttgccagcaactaatcaatagcttaacggatacttgtctgtctatagcggatcttcttaattcatcttctatataaggccaaaacaaaattttacccgccttcgaataaataatagggataaagttcataacagatacataaacgaatttactcgcatttctaatacatgacaataaagcggttaaatcattggttctttccatagtacatagttgttgcggtgcagaagcaataaatacagagtgtggaacgccgcttacgttaatactaagaggatgatctgtattataatacgacggataaaagtttttccaattatatggtagattgttaactccaagataccagtatacctcaaaaatttgagtgagatccgctgccaagttcctattattgaagatcgcaatacccaattccttgacctgagttagtgatctccaatccatgttagcgcttcctaaataaatatgtgtattatcagatatccaaaattttgtatgaagaactcctcctaggatatttgtaatatctatgtatcgtacttcaactccggccatttgtagtctttcaacatcctttaatggtttgttagatttattaacggctactctaactcgtactcctcttttgggtaattgtacaatctcgtttaatattatcgtgccgaaattcgtacccacttcatccgataaactccaataaaaagatgatatatctagtgtttttgtggtattggatagaatttccctccacatgttaaatgtagacaaatatactttatcaaattgcatacctataggaatagtttctgtaatcactgcgattgtattatccggattcattttatttgttaaaagaataatcctatatcacttcactctattaaaaatccaagtttctatttctttcatgactgattttttaacttcatccgtttccttatgaagatgatgtttggcaccttcataaatttttatttctctattacaatttgcatgttgcatgaaataatatgcacctaaaacatcgctaatcttattgtttgttccctggagtatgagagtcggggggtgttaatcttggaaattatttttctaaccttgttggtagccttcaagacctgactagcaaatccagccttaattttttcatgattgactaatgggtcgtattggtatttataaactttatccatatctctagatactgattctggacatagctttccgactggcgcatttggtgtgatggttcccataagtttggcagctagcagattcagtcttgaaacagcatctgcattaactagaggagacattagaatcattgctgtaaacaagtttggattatcgtaagaggctagctcccatggaatgacccaataagtagatttaatagttaccacgtgctgtaccaaagtcatcaatcatcattttttcaccattacttcttccatgtccaatatgatcatgtgagaatactaaaattcctaacgatgatatgttttcagctagttcgtcataacgtccagaatgtttaccagctccatgacttatgaatactaatgccttaggatatgtaataggtttccaatatttacaatatatgtaatcattgtccagattgaacatacagtttgcactcatgattcacgttatataactatcaatattaacagttcgtttgatgatcatattatttttatgttttattgataattgtaaaaacatacaattaaatcaatatagaggaaggagacggctactgtcttttgtaagatagtcatggcgactaaattagattatgaggatgctgttttttactttgtggatgatgataaaatatgtagtcgcgactccatcatcgatctaatagatgaatatattacgtggagaaatcatgttatagtgtttaacaaagatattaccagttgtggaagactgtacaaggaattgatgaagttcgatgatgtcgctatacggtactatggtattgataaaattaatgagattgtcgaagctatgagcgaaggagaccactacatcaattttacaaaagtccatgatcaggaaagtttattcgctaccataggaatatgtgctaaaatcactgaacattggggatacaaaaagatttcagaatctagattccaatcattgggaaacattacagatttgatgaccgacgataatataaacatcttgatactttttctagaaaaaaaattgaattgatgatataggggtcttcataacgcataattattacgttagcattctatatccgtgttaaaaaaaattatcctatcatgtatttgagagttttatatgtagcaaacatgatagctgtgatgccaataagctttagatattcacgcgtgctagtgttagggatggtattatctggtggtgaaatgtccgttatataatctacaaaacaatcatcgcatatagtatgcgatagtagagtaaacatttttatagtttttactggattcatacatcgtctacccaattcggttataaatgaaattgtcgccaatcttacacccaaccccttgttatccattagcatagtattaacttcgttatttatgtcataaactgtaaatgattttgtagatgccatatcatacatgatattcatgtccctattataatcattactaactttatcacaatatatgttgataatatctatatatgatctagtctttgtgggcaactgtctatacaagtcgtctaaacgttgtttactcatatagtatcgaacagccatcattacatggtcccgttccgttgatagataatcgagtatgttagtggacttgtcaaatctatataccatattttctggaagtggatatacatagtcgtgatcaacattattgctagcctcatcttctatatcctgtactataccattatctatatcatctacataatctatgatattattacacataaacatcgacaacatactattgtttattatctaagtcctgttgatccaaacccttgatctcctctatttgtactatctagagattgtacttcttccagttctggataatatatacgttgatagattagctgagctattctatctccagtatttacattaaacgtacattttccattattaataagaatgactcctatgtttcccctataatcttcgtctattacaccacctcctatatcaatgccttttagtgacagaccagacctaggagctattctaccatagcagaacttaggcatggacatactaatatctgtcttaattaactgtctttctcctggagggatagtataatcgtaagcgctatacaaatcatatccggcagcacccggcgattgcctagtaggagatttagctctgttagtttccttaacaaatctaactggtgagttaatattcatgttgaacataaaactaatattttatttcaaaattatttaccatcccatatattccatgaataagtgtgatgattgtacacttctatagtatctatatacgatccacgataaaatcctcctatcaatagcagtttattatccactatgatcaattctggattatccctcggataaataggatcatctatcagagtccatgtattgctggattcacaataaaattccgcatttctaccaaccaagaataaccttctaccgaacactaacgcgcatgatttataatgaggataataagtggatggtccaaactgccactgatcatgattgggtagcaaatattctgtagttgtatcagtttcagaatgtcctcccattacgtatataacattgtttatggatgccactgctggattacatctaggtttcagaagactcggcatattaacccaagcagcatccccgtggaaccaacgctcaacagatgtgggatttggtagacctcctactacgtataatttattgttagcgggtatcccgctagcatacagtctggggctattcatcggaggaattggaatccaattgtttgatatataatttacagctatagcattgttatgtatttcattgttcatccatccaccgatgagatatactacttctccaacatgagtacttgtacacatatggaatatatctataatttgatccatgttcataggatactctatgaatggatacttgtatgatttgcgtggttgtttatcacaatgaaatattttggtacagtctagtatccattttacattatttatacctctgggagaaagataatttgacctgattacatttttgataaggagtagcagatttcctaatttatttcttcgcctcatataccacttaatgacaaaatcaactacataatcctcatctggaacatttagttcatcgctttctagaataagtttcatagatagataatcaaaattgtctatgatgtcatcttccagttccaaaaagtgtttggcaataaagtttttagtatgacataagagattggatagtccgtattctatacccatcatgtaacactcgacacaatattcctttctaaaatctcgtaagataaagtttatacaagtgtagatgataaattctacagaggttaatatagaagcacgtaataaattgacgacgttatgactatctatatatacctttccagtatatgagtaaataactatagaagttaaactgtgaatgtcaaggtctagacaaacccttgtaactggatctttatttttcgtgtatttttgacgtaaatgtgtgcgaaagtaaggagataactttttcaatatcgtagaattgactattatattgcctcctatggcatcaataattgttttgaatttcttagtcatagacaatgctaatatattcttacagtacacagtattgacaaatatcggcatttatgtttctttaaaagtcaacatctagagaaaaatgattatctttttgagacataactcccattttttggtattcacccacacgtttttcgaaaaaattagtttttccttccaatgatatattttccatgaaatcaaacggattggtaacattataaatttttttaaatcccaattcagaaatcaatctatccgcgacgaattctatatatgttttcatcatttcacaattcattcctataagtttaactggaagagccgcagtaagaaattcttgttcaatggatactgcatctgttataatagatctaacggtttcttcactcggtggatgcaataaatgtttaaacatcaaacatgcgaaatcgcagtgcagaccctcgtctctactaattagttcgttggaaaacgtgagtccgggcattaggccacgctttttaagccaaaatatggaagcgaatgatccagaaaagaaaattccttctactgcagcaaaggcaataagtctctctccataaccggcgctgtcatgtatccacttttgagcccaatcggccttcttttttacacaaggcatcgtttctatggcattaaagagatagtttttttcattactatctttaacataagtatcgatcaaaagactatacatttccgaatgaatgttttcaatggccatctgaaatccgtagaaacatctagcctcggtaatctgtacttctgtacaaaatcgttccgccaaattttcattcactattccgtcactggctgcaaaaaacgccaatacatgttttataaaatatttttcgtctggtgttagtttattccaatcattgatatctttagatatatctacttcttccactgtccaaaatgatgcctctgcctttttatacatgttccagatgtcatgatattggattgggaaaataacaaatctatttggatttggtgcaaggatgggttccataactaaattaacaataacaataaattttttttcagttatctatatgcctgtacttggattttttgtacatcgatatcgccgcaatcactacaataattacaagtattattgatagcattgttattagtactatcataattaaattatctacattcatgggtgctgaataatcgttattatcatcattatcattttgtaattgtgacatcatactagataaatcgtttgcgagattgttgtgggaagcgggcatggaggatgcattatcattattatttaacgccttccatttggattcacaaatgttacgcacattcaacattttatggaaactataattttgtgaaaacaaataacaagaaaactcgtcatcgttcaaatttttaacgatagtaaaccgattaaacgtcgagctaatttctaacgctagcgactctgttggatatgggtttccagatatatatcttttcagttcccctacgtatctataatcatctgtaggaaatggaagatatttccatttatctactgttcctaatatcatatgtggtggtgtagtagaaccattaagcgcgaaagatgttatttcgcatcgtattttaacttcgcaataatttctggttagataacgcactctaccagtcaagtcaatgatattagcctttacagatatattcatagtagtcgtaacgatgactccatcttttagatgcgatactcctttgtatgtaccagaatcttcgtacctcaaactcgatatatttaaacaagttaatgagatattaacgcgttttatgaatgatgatatataaccagaagttttatcctcggtggctagcgctataaccttatcattataataccaactagtgtgattaatatgtgacacgtcagtgtgggtacaaatatgtacattatcgtctacgtcgtattcgatacatccgcatacagccaacaaatataaaatgacaaatactctaacgccgttcgtacccatcttgatgcggtttaataaatgttttgatttcaatttattgtaaaaaaagattcggttttatactgttcgatattctcattgcttatattttcatctatcatctccacacagtcaaatccgtggttagcatgcacctcatcaaccggtaaaagactatcggactcttctatcattataactctagaatatttaatttggtcattattaatcaagtcaattatcttatttttaacaaacgtgagtattttactcattttttataaaaacttttagaaatatacagactctatcgtgtgtctatatcttctttttatatccaatgtatttatgtctgatttttcttcatttatcatatataatggtccaaattctacacgtgcttcggattcatccagatcattaaggttcttataattgtaacatccttctcttccctcttctacatcttccttcttattcttattcttagcgtcacagaatctaccacagcaggatcccatgacgagcgtcatattaaactaatccattttcaattataatatatgattagtaatgaccattaaaataaaaaatattcttcataaccggcaagaaagtgaaaagttcacattgaaactatgtcagtagtatacatcatgaaatgatgatatatatatactctattttggtggaggattatatgatataattcgtggataatcatttttaagacacatttctttattcgtaaatcttttcacgttaaatgagtgtccatattttgcaatttcttcatatgatggcggtgtacgtggacgaggctgctcctgttcttgttgtggtcgccgactgtcgtgtctgcgtttagatccctccattatcgcgattgcgtagatggagtactattttataccttgtaattaaatttttttattaattaaacgtataaaaacgttccgtatctgtatttaagagccagatttcgtctaatagaacaaatagctacagtaaaaataactagaataattgctacacccactagaaaccacggatcgtaatacggcaatcggttttcgataataggtggaacgtatattttatttaaggacttaacaattgtctgtaaaccacaatttgcttccgcggatcctgtattaactatctgtaaaagcatatgttgaccgggcggagccgaacattctccgatatctaatttctgtatatctataatattattaacctccgcatacgcattacagttcttttctagcttggataccgcactaggtacatcgtctagatctattcctatttcctcagcgatagctcttctatccttttccggaagcaatgaaatcacttcaataaatgattcaaccatgagtgtgaaactaagtcgagaattactcatgcatttgttagttattcggagcgcgcaatttttaaactgtcctataacctctcctatatgaatagcacaagtgacattagtagggatagaatgttgagctaatttttgtaaataactatctataaaaagattatacaaagttttaaactctttagtttccgccatttatccagtctgagaaaatgtctctcataataaatttttccaagaaactaattgggtgaagaatggaaacctttaatctatatttatcacagtctgttttggtacacatgatgaattcttccaatgccgtactaaattcgatatctttttcgatttctggatatgtttttaataaagtatgaacaaagaaatggaaatcgtaataccagttatgtttaactttgaaattgttttttattttcttgttaatgattccagccacttgggaaaagtcaaagtcgtttaatgccgatttaatacgttcattaaaaacaaactttttatcctttagatgaattattattggttcattggaatcaaaaagtaagatattatcgggtttaagatctgcgtgtaaaaagttgtcgcaacagggtagttcgtagattttaatgtataacagagccatctgtaaaaagataaactttatgtattgtaccaaagatttaaatcctaatttgatagctaactcggtatctactttatctgccgaatacagtgctaggggaaaaattataatgtttcctctttcatattcgtagttagttctcttttcatgttcgaaaaagtgaaacatgcggttaaaatagtttataacattaatattactgttaataactgccggataaaagtgggatagtaatttcacgaatttgatactgtcctttctctcgttaaacgcctttaaaaaaactttagaagaatatctcaatgagagttcctgaccatccatagtttgtatcaataatagcaacatatgaagaacacgtttatacagagtatgtaaaaatgttaatttatagtttaatcccatggcccacgcacacacgattaattttttttcatctccctttagattgttgtatagaaatttgggtactgtgaactccgccgtagtttccatgggactatataattttgtggcctcgaatacaaattttactacatagttatctatcttaaagactataccatatcctcctgtagatatgtgataaaaatcgtcgtttataggataaaatcgtttatccttttgttggaaaaaggatgaattaatgtaatcattctcttctatctttagtagtgtttccttattaaaattcttaaaataatttaacaatctaactgacggagcccaattttggtgtaaatctaattgggacattatattgttaaaatacaaacagtctcctaatataacagtatctgataatctatggggagacatccattgatattcaggggatgaatcattggcaacacccatttattgtacaaaaagccccaatttacaaacgaaagtccaggtttgatagagacaaacaattaactattttgtctctgtttttaacacctccacagtttttaatttctttagtaatgaaattattcacaatatcagtatcttctttatctaccagagattttactaacttgataaccttggctgtctcattcaatagggtagtaatatttgtatgtgtgatattgatatctttttgaattgtttcttttagaagtgattctttgatggtgccagcatacgaattacaataatgcagaaactcggttaacatgcaggaattatagtaagccaattccaattgttgcctgtgttgtattagagtgtcaatatgagcaatggtgtccttgcgtttctctgatagaatgcgagcagcgattttggcgttatcatttgacgatatttctggaatgacgaatcctgtttctactaactttttggtaggacaaagtgaaacaatcaagaagatagcttctcctcctatttgtggaagaaattgaactcctctagatgatctactgacgatagtatctccttgacagatattggaccgaattacagaagtacctggaatgtaaagccctgaaaccccctcattttttaagcagattgttgccgtaaatcctgcactatgcccaagatagagagctcctttggtgaatccatctctatgtttcagtttaaccaagaaacagtcagctggtctaaaatttccatctctatctaatacagcatctaacttgatgtcaggaactatgaccggtttaatgttatatgtaacattgagtaaatccttaagttcataatcatcactgtcatcagttatgtacgatccaaacaatgtttctaccggcatagtggatacgaagatgctatccatcagaatgtttccctgattagtattttctatatagctattcttctttaaacgattttccaaatcagtaactatgttcatttttttaggagtaggacgcctagccagtatggaagaggattttctagatcctctcttcaacatctttgatctcgatggaatgcaaaaccccatagtgaaacaaccaacgataaaaataatattgtttttcactttttataattttaccatctgactcatggattcattaatatctttataagagctactaacgtataattctttataactgaactgagatatatacaccggatctatggtttccataattgagtaaatgaatgctcggcaataactaatggcaaatgtatagaacaacgaaattatactagagttgttaaagttaatattttctatgagctgttccaataaattatttgttgtgactgcgttcaagtcataaatcatcttgatactatccagtaaaccgtttttaagttctggaatattatcatcccattgtaaagcccctaattcgactatcgaatatcctgctctgatagcagtttcaatatcgacggacgtcaatactgtaataaaggtggtagtattgtcatcatcgtgataaactacgggaatatggtcgttagtaggtacggtaactttacacaacgcgatatataactttccttttgtaccatttttaacgtagttgggacgtcctgcagggtattgttttgaagaaatgatatcgagaacagatttgatacgatatttgttggattcctgattattcactataatataatctagacagatagatgattcgataaatagagaaggtatatcgttggtaggataatacatccccattccagtattctcggatactctattgatgacactagttaagaacatgtcttctattctagaaaacgaaaacatcctacatggactcattaaaacttctaacgctcctgattgtgtctcgaatgcctcgtacaaggatttcaaggatgccatagattctttgaccaacgatttagaattgcgtttagcatctgatttttttattaaatcgaatggtcggctctctggtttgctaccccaatgataacaatagtcttgtaaagataaaccgcaagaaaatttatacgcatccatccaaataaccctagcaccatcggatgatattaatgtattattatagattttccatccacaattattgggccagtatactgttagcaacggtatatcgaatagattactcatgtaacctactagaatgatagttcgtgtactagtcataatatctttaatccaatctaaaaaatttaaaattagattttttacactgttaaagttaacaaaagtattacccgggtacgtggatatcatatatggcattggtccattatcagtaatagctccataaactgatacggcgatggtttttatatgtgtttgatctaacgaggaagaaattcgcgcccacaattcatctctagatatgtatttaatatcaaacggtaacacatcaatttcgggacgcgtatatgtttctaaatttttaatccaaatataatgatgacctatatgccctattatcatactgtcaactatagtacacctagggaacttacgatacatctgtttcctataatcgttaaattttacaaatctataacatgctaaaccttttgacgacagccattcattaatttctgatatggaatctgtattctcgataccgtatcgttctaaagccagtgctatatctccctgttcgtgggaacgctttcgtataatatcgatcaacggataatctgaagtttttggagaataatatgactcatgatctatttcgtccataaacaatctagacataggaattggaggcgatgatcttaattttgtgcaatgagtcgtcaatcctataacttctaatcttgtaatattcatcatcgacataatactatctatgttatcatcgtatattagtataccatgaccttcttcatttcgtgccaaaatgatatacagtcttaaatagttacgcaatatctcaatagtttcataattgttagctgttttcatcaaggtttgtatcctgtttaacatgatggcgttctataacgtctctattttctatttttaattttttaaatttttaacgatttactgtggctagatacccaatctctctcaaatatttttttagcctcgcttacaagctgtttatctatactattaaaactgacgaatccgtgattttggtaatgggttccgtcgaaatttgccgaagtgatatgaacatattcgtcgtcgactatcaacaattttgtattattctgaatagtgaaaaccttcacagatagatcattttgaacacacaacgcatctagacttttggcggttgccatagaatatacgtcgttcttatcccaattaccaactagaagtctgatcttaactcctctattaatggctgcttctataatggagttgtaaatgtcgggccaatagtagctattaccgtcgacacgtgtagtgggaactatggccaaatgttcaatatctatactagtcttagctgacctgagtttatcaataactacatcggtatctagatctctagaatatcccaataggtgttccggagaatcagtaaagaacactccacctataggattcttaatatgatacgcagtgctaactggcaaacaacaagccgcagagcataaattcaaccatgaattttttgcgctattaaaggctttaaaagtatcaaatcttctacgaagatctgtggccagcgggggataatcagaatatacacctaacgttttaatcgtatgtatagatcctccagtaaatgacgcgtttcctacataacatctttcatcatctgacacccaaaaacaaccgagtagtagtcccacattattttttttatctatattaacggttataaaatttatatccgggcagtgactttgtagctctcccagatttcttttccctcgttcatctagcaaaactattattttaatccctttttcagatgcctcttttagtttatcaaaaataagcgctcccctagtcgtactcagaggattacaacaaaaagatgctatgtatatatatttcttagctagagtgataatttcgttaaaacattcaaatgttgttaaatgatcggatctaaaatccatattttctggtagtgtttctaccagcctacattttgctcccgcaggtaccgatgcaaatggccacatttagttaacataaaaacttatacatcctgttctatcaacgattctagaatatcatcggctatatcgctaaaattttcatcaaagtcgacatcacaacctaactcagtcaatatattaagaagttccatgatgtcatcttcgtctatttctatatccgtatccattgtagattgttgaccgattatcgagtttaaatcattactaatactcaatccttcagaatacaatctgtgtttcattgtaaatttataggcggtgtatttaagttggtagattttcaattatgtattaatatagcaacagtagttcttgctcctccttgattctagcatcctcttcattattttcttctacgtacataaacatgtccaatacgttagacaacacaccgacgatggcggccgcagatctcgagttatgatctacttccttaccgtgcaataaattagaatatattttctacttttacgagaaattaattattgtatttattatttatgggtgaaaaacttactataaaaagcgggtgggtttggaattagtgaaagcttaaaaattgaaattttattttttttttttggaatataaataagctcgaagtcgacagatctaggcctggtaccaggaggaggaattcagcttaaagatgacttcgaaagtttatgatccagaacaaaggaaacggatgataactggtccgcagtggtgggccagatgtaaacaaatgaatgttcttgattcatttattaattattatgattcagaaaaacatgcagaaaatgctgttatttttttacatggtaacgcggcctcttcttatttatggcgacatgttgtgccacatattgagccagtagcgcggtgtattataccagatcttattggtatgggcaaatcaggcaaatctggtaatggttcttataggttacttgatcattacaaatatcttactgcatggtttgaacttcttaatttaccaaagaagatcatttttgtcggccatgattggggtgcttgtttggcatttcattatagctatgagcatcaagataagatcaaagcaatagttcacgctgaaagtgtagtagatgtgattgaatcatgggatgaatggcctgatattgaagaagatattgcgttgatcaaatctgaagaaggagaaaaaatggttttggagaataacttcttcgtggaaaccatgttgccatcaaaaatcatgagaaagttagaaccagaagaatttgcagcatatcttgaaccattcaaagagaaaggtgaagttcgtcgtccaacattatcatggcctcgtgaaatcccgttagtaaaaggtggtaaacctgacgttgtacaaattgttaggaattataatgcttatctacgtgcaagtgatgatttaccaaaaatgtttattgaatcggatccaggattcttttccaatgctattgttgaaggcgccaagaagtttcctaatactgaatttgtcaaagtaaaaggtcttcatttttcgcaagaagatgcacctgatgaaatgggaaaatatatcaaatcgttcgttgagcgagttctcaaaaatgaacaagcggccgccgccaccatgagcaagggcgaggaactgttcactggcgtggtcccaattctcgtggaactggatggcgatgtgaatgggcacaaattttctgtcagcggagagggtgaaggtgatgccacatacggaaagctcaccctgaaattcatctgcaccactggaaagctccctgtgccatggccaacactggtcactaccttcacctatggcgtgcagtgcttttccagatacccagaccatatgaagcagcatgactttttcaagagcgccatgcccgagggctatgtgcaggagagaaccatctttttcaaagatgacgggaactacaagacccgcgctgaagtcaagttcgaaggtgacaccctggtgaatagaatcgagctgaagggcattgactttaaggaggatggaaacattctcggccacaagctggaatacaactataactcccacaatgtgtacatcatggccgacaagcaaaagaatggcatcaaggtcaacttcaagatcagacacaacattgaggatggatccgtgcagctggccgaccattatcaacagaacactccaatcggcgacggccctgtgctcctcccagacaaccattacctgtccacccagtctgccctgtctaaagatcccaacgaaaagagagaccacatggtcctgctggagtttgtgaccgctgctgggatcacacatggcatggacgagctgtacaagtgagcggccgccctgctagcaagcttgctagcggccgctcgagatctgcggccgctacagacacgaatatgactaaaccgatgaccatttaaaaacccctctctagctttcacttaaactgtatcgatcattcttttagcacatgtataatataaaaacattattctatttcgaatttaggcttccaaaaatttttcatccgtaaaccgataataatatatatagacttgttaatagtcggaataaatagattaatgcttaaactatcatcatctccacgattagagatacaatatttacattctttttgctgtttcgaaactttatcaatacacgttaatacaaacccaggaaggagatattgaaactgaggctgttgaaaatgaaacggtgaatacaataattcagataatgtaaaatcatgattccgtattctgatgatattagaactgctaatggatgtcgatggtatgtatctaggagtatctattttaacaaagcatcgatttgctaatatacaattatccttttgattaattgttattttattcatattcttaaaaggtttcatatttatcaattcttctacattaaaaatttccatttttaatttatgtagccccgcaatactcctcattacgtttcattttttgtctataatatccattttgttcatctcggtacatagattatccaattgagaagcgcatttagtagttttgtacattttaagtttattgacgaatcgtcgaaaactagttatagttaacattttattatttgataccctgatattaatacccctgccgttactattatttataactgatgtaatccacgtaacattggaattaactatcgatagtaatgcatcgacgcttccaaaattgtctattataaactcaccgataatttttttattgcatgttttcatattcattaggattatcaaatctttaatcttattacgattgtatgcgttgatattacaagacgtcattctaaaagacggaggatctccatcaaatgccagacaatcacgtacaaagtacatggaaataggttttgttctattgcgcatcatagatttatatagaacacccgtagaaatactaatttgttttactctataaaatactaatgcatctatttcatcgttttgtataacgtctttccaagtgtcaaattccaaatttttttcattgatagtaccaaattcttctatctctttaactacttgcatagataggtaattacagtgatgcctacatgccgttttttgaaactgaatagatgcgtctagaagcgatgctacgctagtcacaatcaccactttcatatttagaatatatatatgtaaaaatatagtagaatttcattttgtttttttctatgctataaatgaattctcattttgcatctgctcatactccgttttatattaataccaaagaaggaagatatctggttctaaaagccgttaaagtatgcgatgttagaactgtagaatgcgaaggaagtaaagcttcctgcgtactcaaagtagataaaccctcatcgcccgcgtgtgagagaagaccttcgtccccgtccagatgcgagagaatgaataaccctggaaaacaagttccgtttatgaggacggacatgctacaaaatatgttcgcggctaatcgcgataatgtagcttctagacttttgtcctaaaatactattatatccttttcgatattaataaatccgtgtcgtccaggttttttatctctttcagtatgtgaatagataggtattttatctctattcatcatcgaatttaagagatccgataaacattgtttgtattctccagatgtcagcatctgatacaacaatatatgtgcacataaacctctggcacttatttcatgtaccttccccttatcactaaggagaatagtatttgagaaatatgtatacatgatattatcatgaattagatatacagaatttgtaacactctcgaaatcacacgatgtgtcggcgttaagatctaatatatcactcgataacacattttcatctagatacactagacattttttaaagctaaaatagtctttagtagtaacagtaactatgcgattattttcatcgatgatacatttcatcggcatattattacgcttaccatcaaagactataccatgtgtatatctaacgtattctagcatggttgccatacgcgcattaaacttttcaggatctttggatagatcttccaatctatctatttgagaaaacatttttatcatgttcaatagttgaaacgtcggatccactatatagatattatctataaagattttaggaactacgttcatggtatcctggcgaatattaaaactatcaatgatatgattatcgttttcatcttttatcaccatatagtttctaagatatgggattttacttaatataatattatttcccgtgataaattttattagaaaggccaaatctataagaaaagtcctagaattagtctgaagaatatctatatcgccgtatagtatatttggattaattagatatagagaatatgatccgtaacatatacaacttttattatggcgtctaagatattcttccatcaacttattaacatttttgactagggaagatacattatgacgtcccattacttttgccttgtctattactgcgacgttcatagaatttagcatatctcttgccaattcttccattgatgttacattataagaaattttagatgaaattacatttggagctttaatagtaagaactcctaatatgtccgtgtatgtggtcactaatacagattgtagttctataatcgtaaataatttacctatattatatgtttgagtctgtttagaaaagtagctaagtatacgatcttttatttctgatgcagatgtattaacatcggaaaaaaatctttttttattcttttttactaaagatacaaatatgtctttgttaaaaacagttattttctgaatatttctagcttgtaattttaacatatgatattcgttcacactaggtactctgcctaaataggtttctataatctttaatgtaatattaggaaaagtattctgatcaggattcctattcattttgaggatttaaaactctgattattgtctaatatggtctctacgcaaactttttcacagagcgatagagtttttgataactcgtttttcttaagaaatataaaactactgtctccagagctcgctctatcttttattttatctaattcgatacaaactcctgatactggttcagaaagtaattcattaattttcagtcctttatagaagatatttaatatagataatacaaaatcttcagtttttgatatcgatctgattgatcctagaactagatatattaataacgtgctcattaggcagtttatggcagcttgataattagatatagtatattccagttcatatttattagataccgcattgcccagattttgatattctatgaattcctctgaaaataaatccaaaataactagacattctattttttgtggattagtgtactctcttccctctatcatgttcactactggtgtccacgatgataaatatctagagggaatataatatagtccataggatgccaatctagcaatgtcgaataactgtaattttattcttcgctcttcattatgaattgattcttgaggtataaacctaacacaaattatattattagacttttcgtatgtaatgtctttcatgttataagtttttaatcctggaatagaatctattttaatgaggcttttaaacgcagagttctccaacgagtcaaagcataatactctgttgtttttcttatatacgatgttacgattttcttctttgaatggaataggtttttgaattagtttataattacaacataatagataaggaagtgtgcaaatagtacgcggaaaaaacataatagctcccctgttttcatccatggttttaagtaaatgatcactggcttctttagtcaatggatattcgaacattaaccgtttcatcatcattggacagaatccatatttcttaatgtaaagagtgatcaaatcattgtgtttattgtaccatcttgttgtaaatgtgtattcggttatcggatctgctcctttttctattaaagtatcgatgtcaatctcgtctaagaattcaactatatcgacatatttcatttgtatacacataaccattactaacgtagaatgtataggaagagatgtaacgggaacagggtttgttgattcgcaaactattctaatacataattcttctgttaatacgtcttgcacgtaatctattatagatgccaagatatctatataattattttgtaagatgatgttaactatgtgatctatataagtagtgtaataattcatgtattttgatatatgttccaactctgtctttgtgatgtctagtttcgtaatatctatagcatcctcaaaaaatatattcgcatatattcccaagtcttcagttctatcttctaaaaaatcttcaacgtatggaatataataatctattttacctcttctgatatcattaatgatatagtttttgacactatcttctgtcaattgattcttattcactatatctaagaaacggatagcgtccctaggacgaactactgccattaatatctctattatagcttctggacataattcatctattataccagaattaatgggaactattccgtatctatctaacatagttttaagaaagtcagaatctaagacttgatgttcatatattggttcatacatgaaatgatctctattgatgatagtgactatttcattctctgaaaattggtaactcattctatatatgctttccttgttgatgaaggatagaatatactcaatagaatttgtaccaacaaactgttctcttatgaatcgtatatcatcatctgaaataatcatgtaaggcatacatttaacaattagagacttgtctcctgttatcaatatactattcttgtgataatttatgtgtgaggcaaatttgtccacgttctttaattttgttatagtagatatcaaatccaatggagctacagttcttggcttaaacagatatagtttttctggaacaaattctacaacattattataaaggactttgggtagataagtgggatgaaatcctattttaattaatgcgatagccttgtcctcgtgcagatatccaaacgcttttgtgatagtatggcattcattgtctagaaacgctctacgaatatctgtgacagatatcatctttagagaatatactagtcgcgttaatagtactacaatttgtattttttaatctatctcaataaaaaaattaatatgtatgattcaatgtataactaaactactaactgttattgataactagaatcagaatctaatgatgacgtaaccaagaagtttatctactgccaatttagctgcattatttttagcatctcgtttagattttccatcggccttatcgaatactcttccgtcgatgtctacacaggcataaaatgtaggagagttactaggcccaactgattcaatacgaaaagaccaatctctcctagtaatttggcagtactcattaataacggtgacagggttagcatctttccaatcaataatttttttagccggaataacatcatcaaaagacttatgatcctctctcattgatttttcgcgggatacatcatctattatgacgtcagccatagcatcagcatccggcttatccgcctccgttgtcataaaccaacgaggaggaatatcgtcggagctgtacaccatagcactacgttgaagatcgtacagagctttattaacttctcgcttctccatattaagttgtctagttagttgtgcagcagtagctccttcgattccaatgtttttaatagccgcacacacaatctctgcgtcagaacgctcgtcaatatagatcttagacatttttagagagaactaacgcaaccagcaataaaactgaacctactttatcatttttttattcatcatcctctggtggttcgtcgttcctatcaaatgtagctctgattaacccgtcatctataggtgatgctggttctggagattctggaggagatggattattatctggaagaatctctgttatttccttgttttcatgtatcgattgcgttgtaacattaagattgcgaaatgctctaaatttgggaggcttaaagtgttgtttgcaatctctacacgcgtgtctaactagtggaggttcgtcagctgctctagtttgaatcatcatcggcgtagtattcctacttttacagttaggacacggtgtattgtatttctcgtcgagaacgttaaaataatcgttgtaactcacatcctttattttatctatattgtattctactcctttcttaatgcattttataccgaataagagatagcgaaggaattctttttcggtgccgctagtacccttaatcatatcacatagtgttttatattccaaatttgtggcaatagacggtttatttctatacgatagtttgtttctggaatcctttgagtattctataccaatattattctttgattcgaatttagtttcttcgatattagattttgtattacctatattcttgatgtagtactttgatgatttttccatggcccattctattaagtcttccaagttggcatcatccacatattgtgatagtaattctcggatatcagtagcggctaccgccattgatgtttgttcattggatgagtaactactaatgtatacattttccatttataacacttatgtattaactttgttcatttatattttttcattattatgttgatattaacaaaagtgaatatatatatgttaataattgtattgtggttatacggctacaattttataatgagtgaaagtcagtgtccgatgatcaatgacgatagctttactctgaaaagaaagtatcaaatcgatagtgcggagtcaacaataaaaatggataagaagaggataaagtttcagaatagagccaaaatggtaaaagaaataaatcagacaataagagcagcacaaactcattacgagacattgaaactaggatacataaaatttaagagaatgattatgactactactctagaagatatagcaccatctattccaaataatcagaaaacttataaactattctcggacatttcagccatcggcaaagcatcacagaatccgagtaagatggtatatgctctgctgctttacatgtttcccaatttgtttggagatgatcatagattcattcgttatagaatgcatccaatgagtaaaatcaaacacaagatcttctctcctttcaaacttaatcttattagaatattagtggaagaaagattctataataatgaatgcagatctaataaatggagaataattggaacacaagttgataaaatgttgatagctgaatctgataaatatacaatagatgcaaggtataacctaaaacccatgtatagaatcaagggagaatctgaagaagataccctctttatcaaacagatggtagaacaatgtgtgacatcccaggaattggtggaaaaagtgttgaagatactgtttagagatttgttcaagagtggagaatacaaagcgtacagatacgatgatgatgtagaaaatggatttattggattggatacactaaaattaaacattgttcatgatatagttgaaccatgtatgcctgttcgtaggccagtggctaagatactgtgtaaagaaatggtaaataaatactttgagaatccgctacatattattggtaaaaatcttcaagagtgcattgactttgttagtgaataggcatttcatctttctccaatactaattcaaattgttaaattaataatggatagtataaatagttattagttataagatagtaaaaataattattagaataagagtgtagtatcatagataactctcttctataaaaatggattttattcgtagaaagtatcttatatacacagtagaaaataatatagattttttaaaggatgatacattaagtaaagtaaacaattttaccctcaatcatgtactagctctcaagtatctagttagcaattttcctcaacacgttattactaaggatgtattagctaataccaatttttttgttttcatacatatggtacgatgttgtaaagtgtacgaagcggttttacgacacgcatttgatgcacccacgttgtacgttaaagcattgactaagaattatttatcgtttagtaacgcaatacaatcgtacaaggaaaccgtgcataaactaacacaagatgaaaaatttttagaggttgccgaatacatggacgaattaggagaacttataggcgtaaattatgacttagttcttaatccattatttcacggaggggaacccatcaaagatatggaaatcatttttttaaaactgtttaagaaaacagacttcaaagttgttaaaaaattaagtgttataagattacttatttgggcatacctaagcaagaaagatacaggcatagagtttgcggataatgatagacaaaatatatacactctatttcaacaaactggtagaatcgtccatagcaatctaacagaaacgtttagagattatatctttcccggagataagactagctattgggtgtggttaaacgaaagtatagctaatgatgcggatatcgttcttaatagacacgccattaccatgtatgataaaattcttagttatatatactctgagataaaacaaggacgcgttaataaaaacatgcttaagttagtttatatctttgagcctgaaaaagatatcagagaacttctgctagaaatcatatatgatattcctggagatatcctatctattattgatgcaaaaaacgacgattggaaaaaatattttattagtttttataaagctaattttattaacggtaatacatttattagtgatagaacgtttaacgaggacttattcagagttgttgttcaaatagatcccgaatatttcgataatgaacgaattatgtctttattctctacgagtgctgcggacattaaacgatttgatgagttagatattaataacagttatatatctaatataatttatgaggtgaacgatatcacattagatacaatggatgatatgaagaagtgtcaaatctttaacgaggatacgtcgtattatgttaaggaatacaatacatacctgtttttgcacgagtcggatcccatggtcatagagaacggaatactaaagaaactgtcatctataaaatccaagagtagacggctgaacttgtttagcaaaaacattttaaaatattatttagacggacaattggctcgtctaggtcttgtgttagatgattataaaggagacttgttagttaaaatgataaaccatcttaagtctgtggaggatgtatccgcattcgttcgattttctacagataaaaaccctagtattcttccatcgctaatcaaaactattttagctagttataatatttccatcatcgtcttatttcaaaggtttttgagagataatctatatcatgtagaagaattcttggataaaagcatccatctaaccaagacggataagaaatatatacttcaattgataagacacggtagatcatagaacagaccaaatatattattaataatttgtatatacatagatataattatcacacatttttgataaatgggaactgctgcaacaattcagactcccaccaaattaatgaataaagaaaatgcagaaatgattttggaaaaaattgttgatcatatagttatgtatattagtgacgaatcaagtgattcagaaaataatcctgaatatattgattttcgtaacagatacgaagactatagatctctcattataaaaagtgatcacgagtttgtaaagctatgtaaaaatcatgcggagaaaagttctccagaaacgcaacaaatgattatcaaacacatatacgaacaatatcttattccagtatctgaagtactattaaaacctataatgtccatgggtgacataattacatataacggatgtaaagacaatgaatggatgctagaacaactctctaccctaaactttaacaatctccgcacatggaactcatgtagcataggcaatgtaacgcgtctgttttatacattttttagttatctgatgaaagataaactaaatatataagtataatcccattctaatactttaacctgatgtattagcatcttattagaatattaacctaactaaaagacataacataaaaactcattacatagttgataaaaagcggtaggatataaatattatggctgccaccgttccgcgttttgacgacgtgtacaaaaatgcacaaagaagaattctagatcaagaaacattttttagtagaggtctaagtagaccgttaatgaaaaacacatatctatttgataattacgcgtatggatggataccagaaactgcaatttggagtagtagatacgcaaacctagatgctagtgactattatcccatttcgttgggattacttaaaaagttcgagtttctcatgtctctatataaaggtcctattcccgtatatgaagaaaaagtaaatactgaattcatagccaatggatcgttctctggtagatacgtatcatatcttcgaaagttttctgcccttccaacaaacgagtttattagttttttgttactgacttccattccaatctataatatcttgttctggtttaaaaacacacagtttgatattactaaacacacattattcagatacgtctatacagataatgccaaacacctggcgttggctaggtatatgcatcaaacaggagactataagcctttgtttagtcgtctcaaagagaattatatatttaccggtcccgttccaataagtatcaaagatatagatcaccctaatcttagtagagcaagaagtccatccgattatgagacattagctaatattagtactatattgtactttaccaagtatgatccggtattaatgtttttattgttttacgtacctgggtattcaattactacaaaaattactccagccgtagaatatctaatggataaactgaatctaacaaagagcgacgtacaactgttgtaaattattttatgcttcgtaaaatgtaggttttgaaccaaacattctttcaaagaatgagatgcataaaactttattatccaatagattgactatttcggacgtcaatcgtttaaagtaaacttcgtaaaatattctttgatcactgccgagtttaaaacttctatcgataattgtctcatatgttttaatatttacaagttttttggtccatggtacattagccggacaaatatatgcaaaataatatcgttctccaagttctatagtttctggattatttttattatattcagtaactaaatacatattagggttatctgcggatttataatttgagtgatgcattctactcaacataaataattctagaggagacgatctactatcaaattcggatcgtaaatctgtttctaaagaacggagaatatctatacatacctgattagaattcatccgtccttcagacaacatctcagacagtctggttttgtacatcttaatcatattcttatgaaacttggaaacatctcttctagtttcactagtacctttattaattctctcaggtacagattttgaattcgacgatgctgagtatttcatcgttgtatatttcttcttcgattgcataatcagattcttatataccgcctcaaactctattttaaaattattaaacaatactctattattaatcagtcgttctaactctttcgctatttctatagacttatctacatcttgactgtctatctctgtaaacacggagtcggtatctccatacacgctacgaaaacgaaatctgtaatctataggcaacgatgttttcacaatcggattaatatctctatcgtccatataaaatggattacttaatggattggcaaaccgtaacataccgttagataactctgctccatttagtaccgattctagatacaagatcattctacgtcctatggatgtgcaactcttagccgaagcgtatgagtatagagcactatttctaaatcccatcagaccatatactgagttggctactatcttgtacgtatattgcatggaatcatagatggccttttcagttgaactggtagcctgttttagcatctttttatatctggctctctctgccaaaaatgttcttaatagtctaggaatggttccttctatcgatctatcgaaaattgctatttcagagatgaggttcggtagtctaggttcacaatgaaccgtaatatatctaggaggtggatatttctgaagcaatagctgattatttatttcttcttccaatctattggtactaacaacgacaccgactaatgtttccggagatagatttccaaagatacacacattaggatacagactgttataatcaaagattaatacattattactaaacattttttgttttggagcaaataccttaccgccttcataaggaaacttttgttttgtttctgatctaactaagatagttttagtttccaacaatagctttaacagtggacccttgatgactgtactcgctctatattcgaataccatggattgaggaagcacatatgttgacgcacccgcgtctgtttttgtttctactccataatactcccacaaatactgacacaaacaagcatcatgaatacagtatctagccatatctaaagctatgtttagattataatccttatacatctgagctaaatcaacgtcatcctttccgaaagataatttatatgtatcattaggtaaagtaggacataatagtacgactttaaatccattttcccaaatatctttacgaattactttacatataatatcctcatcaacagtcacataattacctgtggttaaaacctttgcaaatgcagcggctttgcctttcgcgtctgtagtatcgtcaccgatgaacgtcatttctctaactcctctatttaatactttacccatgcaactgaacgcgttcttggatatagaatccaatttgtacgaatccaatttttcaaatttttgaatgaatgaatatagatcgaaaaatatagttccattattgttattaacgtgaaacgtagtattggccatgccgcctactcccttatgactagactgatttctctcataaatacagagatgtacagcttcctttttgtccggagatctaaagataattttctctcctgttaataactctagacgattagtaatatatctcagatcaaagttatgtccgttaaaggtaacgacgtagtcgaacgttagttccaacaattgtttagctattcgtaacaaaactatttcagaacatagaactagttctcgttcgtaatccatttccattagtgactgtatcctcaaacatcctctatcgacggcttcttgtatttcctgttccgttaacatctcttcattaatgagcgtaaacaataatcgtttaccacttaaatcgatataacagtaacttgtatgcgagattgggttaataaatacagaaggaaacttcttatcgaagtgacactctatatctagaaataagtacgatcttgggatatcgaatctaggtatttttttagcgaaacagttacgtggatcgtcacaatgataacatccattgttaatctttgtcaaatattgctcgtccaacgagtaacatccgtctggagatatcccgttagaaatataaaaccaactaatattgagaaattcatccatggtggcattttgtatgctgcgtttctttggctcttctatcaaccacatatctgcgacggagcattttctatctttaatatctagattataacttattgtctcgtcaatgtctatagttctcatctttcccaacggcctcgcattaaatggaggaggagacaatgactgatatatttcgtccgtcactacgtaataaaagtaatgaggaaatcgtataaatacggtctcgccatttcgacatctggatttcagatataaaaatctgttttcaccgtgactttcaaaccaattaatgcaccgaacatccatttatagaatttagaaatatattttcatttaaatgaatcccaaacattggggaagagccgtatggaccattatttttatagtactttcgcaagcgggtttagacggcaacatagaagcgtgtaaacgaaaactatatactatagttagcactcttccatgtcctgcatgtagacggcacgcgactatcgctatagaggacaataatgtcatgtctagcgatgatctgaattatatttattattttttcatcagattatttaacaatttggcatctgatcccaaatacgcgatcgatgtgacaaaggttaaccctttataaacttaacccattataaaacttatgattagtcacaactgaaataaccgcgtgattattttttggtataattctacacggcatggtttctgtgactatgaattcaacccccgttacattagtgaaatctttaacaaacagcaagggttcgtcaaagacataaaactcattgtttacaatcgaaatagaccccctatcacacttaaaataaaaaatatccttatcctttaccaccaaataaaattctgattggtcaatgtgaatgtattcacttaacagttccacaaatttatttattaactccgaggcacatacatcgtcggtattttttatggcaaactttactcttccagcatccgtttctaaaaaaatattaacgagttccatttatatcatccaatattattgaaatgacgttgatggacagatgatacaaataagaaggtacggtacctttgtccaccatctcctccaattcatgctctattttgtcattaactttaatgtatgaaaacagtacgccacatgcttccatgacagtgtgtaacactttggatacaaaatgtttgacattagtataattgtccaagactgtcaatctataatagatagtagctataatatattctatgatggtattgaagaagatgacaaccttggcatattgatcatttaacacagacatggtatcaacagatagcttgaatgaaagagaatcagtaattggaataagcgtcttctcgatagagtgtccgtataccaacatgtctgatattttgatgtattccattaaattatttagttttttctttttattctcgttaaacagcatttctgtcaacggaccccaacatcgttgaccgattaagttttgattgatttttccgtgtaaggcgtatctagtcagatcgtatagcctatccaataatccatcgtctgtgtgtagatcacatcgtacactttttaattctctatagaagagcgacagacatctggagcaattacagacagcaatttctttattctctacagatgtaagatacttgaagacattcctatgatgatgcagaattttggataacacggtattgatggtatctgttaccataattcctttgatggctgatagtgtcagagcacaagatttccaatctttgacaatttttagcaccattatctttgttttgatatctatatcagacagcatggtgcgtctgacaacacagggattaagacggaaagatgaaatgattctctcaacatcttcaatagataccttgctattttttctggcattatctatatgtgcgagaatatcctctagagaatcagtatcctttttgatgatagtggatctcaatgacatgggacgtttaaaccttcttattctatcaccagattgcatggtgatttgtcttctttcttttatcataatgtaatctctaaattcatcggcaaattgtctatatctaaaatcataatatgagatgtttacctctacaaatatctgttcgtccaatgttagagtatttacatcagttttgtattccaaattaaacatggcaacggatttaattttatattcctctattaagtcctcgtcgataataacagaatgtagataatcatttaatccgtcgtacatggttggaagatgcttgttgacaaaatctttaattgtcttgatgaaggtgggactatatctaacatcttgattaataaaatttataacattgtccataggatactttgtaactagttttatacacatctcttcatcggtaagtttagacagaatatcgtgaacaggtggtatattatattcatcagatatacgaagaacaatgtccaaatctatattgtttaatatattatatagatgtagcgtagctcctacaggaatatctttaactaagtcaatgatttcatcaaccgttagatctattttaaagttaatcatataggcattgatttttaaaaggtatgtagccttgactacattctcattaattaaccattccaagtcattgtgtgtaagaagattatattctatcataagcttgactacatttggtcccgataccattaaagaattcttatgatataaggaaacagattttaggtactcatctactctacaagaattttggagagccttaacgatatcagtgacgtttattatttcaggaggaaagaatctaacattgagaatatcggaattaatagcttccagatacagtgattttggcaatagtccgtgtaatccataatccagtaacacgagctggtgcttgctagacaccttttcaatgtttaatttttttgaaataagctttgataaagccttcctcgcaaattccggatacatgaacatgtcggcgacatgattaagtattgttttttcattatttttatattttctcaacaagttctcaataccccaatagatgatagaatatcacccaatgcgtccatgttgtctatttccaacaggtcgctatatccaccaatagaagtttttccaaaaaagattctaggaacagttctaccaccagtaatttgttcaaaataatcccgcaattcattttcgggtttaaattctttaatatcgacaatttcatacgctcctcttttgaaactaaacttatttagaatatccagtgcatttctacaaaaaggacatgtatacttgacaaaaattgtcactttgttattggccaacctttgttgtacaaattcctcggccattttaatatttaagtgatataaaactatctcgacttatttaactctttagtcgagatatatggacgcagatagctatatgatagccaactacagaaggcaaacgctataaaaaacataattacgacgagcatatttataaatatttttattcagcattacttgatatagtaatattaggcacagtcaaacattcaaccactctcgatacattaactctctcattttctttaacaaattctgcaatatcttcgtaaaaagattcttgaaactttttagaatatctatcgactctagatgaaatagcgttcgtcaacatactatgttttgtatacataaaggcgcccattttaacagtttctagtgacaaaatgctagcgatcctaggatcctttagaatcacatagattgacgattcgtctctcttagtaactctagtaaaataatcatacaatctagtacgcgaaataatattatccttgacttgaggagatctaaacaatctagttttgagaacatcgataagttcatcgggaatgacatacatactatctttaatagaactcttttcatccagttgaatggattcgtccttaaccaactgattaatgagatcttctattttatcattttccagatgatatgtatgtccattaaagttaaattgtgtagcgcttctttttagtctagcagccaatactttaacatcactaatatcgatatacaaaggagatgatttatctatggcattaagaattcgtttttcgacatccgtcaaaaccaattcctttttgcctgtatcatccagttttccatcctttgtaaagaaattattttctactagactattaataagactgataaggattcctccataattgcacaatccaaactttttaacaaaactagactttacgagatctacaggaatgcgtacttcaggttttttagcttgtgattttttcttttgcggacattttctagtaaccaactcatctaccatttcattgattttagcagtgaaataagctttcaatgcacgggcactgatactattgaaaacgagttgatcttcaaattccgccatttaagttcaccaaacaacttttaaatacaaatatatcaatagtagtagaataagaactataaaaaaaataataattaaccaaccccaacaaccggtattattagttgatgtggtagttttctcatcacttagaacagatttaacaatttctataaagtctgtcaaatcatcttccggagaccccataaatacaccaaatatagcggcgtacaacttatccatttatacattgaatattggcttttctttatcgctatcttcatcatattcatcatcaatatcaacaagtcccagattacgagccagatcttcttctacattttcagtcattgatacacgttcactatctccagagagtccgataacgttagccaccacttctctatcaatgattagtttcttgagcgcgaaagtaatttttgtttccgttccggatctatagaagacgataggtgtgataattgccttggccaattgtctttctcttttactgagtgattctagttcaccttctatagatctgagaatggatgattctccagtcgaaacatattctaccatggatccgtttaatttgttgatgaagatggattcatccttaaatgttttctctgtaatagtttccaccgaaagactatgcaaagaatttggaatgcgttccttgtgcttaatgtttccatagacggcttctagaagttgatacaacataggactagccgcggtaacttttatttttagaaagtatccatcgcttctatcttgtttagatttatttttataaagtttagtctctccttccaacataataaaagtggaagtcatttgactagataaactatcagtaagttttatagagatagacgaacaattagcgtattgagaagcatttagtgtaacgtattcgatacattttgcattagatttactaatcgattttgcatactctataacacccgcacaagtctgtagagaatcgctagatgcagtaggtcttggtgaagtttcaactctcttcttgattaccttactcatgattaaacctaaataattgtactttgtaatataatgatatatattttcactttatctcatttgagaataaaaatgtttttgtttaaccactgcatgatgtacagatttcggaatcgcaaaccaccagtggttttattttatccttgtccaatgtgaattgaatgggagcggatgcgggtttcgtacgtagatagtacattcccgtttttagaccgagactccatccgtaaaaatgcatactcgttagtttggaataactcggatctgctatatggatattcatagattgactttgatcgatgaaggctcccctgtctgcagccatttttatgatcgtcttttgtggaatttcccaaatagttttataaactcgcttaatatcttctggaaggtttgtattctgaatggatccaccatctgccataatcctattcttgatctcatcattccataattttctctcggttaaaactctaaggagatgcggattaactacttgaaattctccagacaatactctccgagtgtaaatattactggtatacggttccaccgactcattatttcccaaaatttgagcagttgatgcagtcggcataggtgccaccaataaactatttctaagaccgtatgttctgattttatcttttagaggttcccaattccaaagatccgacggtacaacattccaaagatcatattgtagaataccgttactggcgtacgatcctacatatgtatcgtatggtccttccttctcagctagttcacaactcgcctctaatgcaccgtaataaatggtttcgaagatcttcttatttagatcttgtgcttccaggctatcaaatggataatttaagagaataaacgcgtccgctaatccttgaacaccaataccgataggtctatgtctcttattagagatttcagcttctggaataggataataattaatatctataattttattgagatttctgacaattactttgaccacatccttcagtttgagaaaatcaaatcgcccatctattacaaacatgttcaaggcaacagatgccagattacaaacggctacctcattagcatccgcatattgtattatctcagtgcaaagattactacacttgatagttcctaaattttgttgattactctttttgttacacgcatccttataaagaatgaatggagtaccagtttcaatctgagattctataatcgctttccagacgactcgagcctttattatagatttgtatctcctttctctttcgtatagtgtatacaatcgttcgaactcgtctccccaaacattgtccaatccaggacattcatccggacacatcaacgaccactctccgtcatccttcactcgtttcataaagagatcaggaatccaaagagctataaatagatctctggttctatgttcctcgtttcctgtattctttttaagatcgaggaacgccataatatcagaatgccacggttccaagtatatggccataactccaggccgtttgtttcctccctgatctatgtatctagcggtgttattataaactctcaacattggaataataccgtttgatataccattggtaccggagatatagcttccactggcacgaatattactaattgatagacctattccccctgccattttagagattaatgcgcatcgttttaacgtgtcatagataccctctatgctatcatcgatcatgttaagtagaaaacagctagacatttggtgacgactagttcccgcattaaataaggtaggagaagcgtgcgtaaaccatttttcagaaagtagattgtacgtctcaatagctgagtctatatcccattgatgaattcctactgcgacacgcattaacatgtgctgaggtctttcaacgatcttgttgtttattttcaacaagtaggatttttccaaagttttaaaaccaaaatagttgtatgaaaagtctcgttcgtaaataataaccgagttgagtttatccttatatttgttaactatatccatggtgatacttgaaataatcggagaatgtttcccatttttaggattaacatagttgaataaatcctccatcacttcactaaatagtttttttgtttccttgtgtagatttgatacggctattctggcggctagaatggcataatccggatgttgtgtagtacaagtggctgctatttcggctgccagagtgtccaattctaccgttgttactccattatatattccttgaataaccttcatagctattttaataggatctatatgatccgtgtttaagccataacataattttctaatacgagacgtgattttatcaaacatgacattttccttgtatccatttcgtttaatgacaaacatttttgttggtgtaataaaaaaattatttaacttttcattaatagggatttgacgtatgtagcgtacaaaatgattgttcctggtatatagataaagagtcctatatatttgaaaatcgttacggctcgattaaactttaatgattgcatagtgaatatatcattaggatttaactccttgactatcatggcggcgccagaaattaccatcaaaagcattaatacagttataccgatcgcagttagaacggttatagcatccaccatttatatctaaaaattagatcaaagaatatgtgacaaagtcctagttgtatactgagaattgacgaaacaatgtttcttacatatttttttcttattagtaaccgacttaatagtaggaactggaaaactagacttgattattctataagtatagatacccttccaaataatattctctttgataaaagttccagaaaatgtagaattttttaaaaagttatcttttgctattaccaagattgtgtttagacgcttattattaatatgagtgatgaaatccacaccgcctctagatatcgcctttatttccacattagatggtaaatccaatagtgaaactatctttttaggaatgtatggactcgcgtttagaggagtaaacgtcttaggcgtcggaaaggatgattcatcaaacgaataaacaatttcacaaatggatgttaatgtattagtaggaaattttttgacgctattggaattgaagattctaatggatgatgttctacctatttcatccgataacatgttaatttccgacaccaacggttttaatatttcgatgatatacggtagtctctctttcggacttatatagcttattccacaatacgagtcattatatactccaaaaaacaaaataactagtataaaatctgtatcgaatgggaaaaacgaaattatcgacataggtatagaatccggaacattgaacgtattaatacttaattctttttctgtggtaagtaccgataggttattgacattgtatggttttaaatattctataacttgagacttgatagatattagtgatgaattgaaaattatttttatcaccacgtgtgtttcaggatcatcgtcgacgcccgtcaaccaaccgaacggagtaaaataaatatcattaatatatgctctagatattagtatttttatcaatcctttgattatcatcttctcgtaggcgaatgattccatgatcaagagtgatttaagaacatcctccggagtattaatgggcttagtaaacagtccatcgttgcaataataaaagttatccaagttaaaggatattatgcattcgtttaaagatatcacctcatctgacggagacaattttttggtaggttttagagactttgaagctacttgtttaacaaagttattcatcgtcgtctactattctatttaattttgtagttaatttatcacatatcacattaattgactttttggtccacttttccatacgtttatattcttttaatcctgcgttatccgtttccgttatatccagggatagatcttgcaagttaaatagaatgctcttaaataatgtcattttcttatccgctaaaaatttaaagaatgtataaacctttttcagagatttgaaactcttaggtggtgtcctagtacacaatatcataaacaaactaataaacattccacattcagattccaacagctgattaacttccacattaatacagcctattttcgctccaaatgtacattcgaaaaatctgaataaaacatcgatgtcacaatttgtattatccaatacagaatgtttgtgattcgtgttaaaaccatcggagaaggaatagaaataaaaattattatagtggtggaattcagttggaatattgcctccggagtcataaaaggatactaaacattgttttttatcataaattacacatttccaatgagacaaataacaaaatccaaacattacaaatctagaggtagaacttttaattttgtctttaagtatatacgataagatatgtttattcataaacgcgtcaaatttttcatgaatcgctaaggagtttaagaatctcatgtcaaattgtcctatataatccacttcggatccataagcaaactgagagactaagttcttaatacttcgattgctcatccaggctcctctctcaggctctattttcatcttgacgacctttggattttcaccagtatgtattcctttacgtgataaatcatcgattttcaaatccatttgtgagaagtctatcgccttagatactttttcccgtagtcgaggtttaaaaaaatacgctaacggtatactagtaggtaactcaaagacatcatatatagaatggtaacgcgtctttaactcgtcggttaactctttcttttgatcgagttcgtcgctactattgggtctgctcaggtgccccgactctactagttccaacatcataccgataggaatacaagacactttgccggcggttgtagatttatcatatttttccactacatatccgttacaatttgttaaaaatttagatacatctatattgctacataatccagctagtgaatatatatgacataataaattggtaaatcctagttctggtattttactaattactaaatctgtatatctttccatttatcatggaaaagaatttaccagatatcttcttttttccaaactgcgttaatgtattctcttacaaatattcacaagatgaattcagtaatatgagtaaaacggaacgtgatagtttctcattggccgtgtttccagttataaaacatagatggcataacgcacacgttgtaaaacataaaggaatatacaaagttagtacagaagcacgtggaaaaaaagtatctcctccatcactaggaaaacccgcacacataaacctaaccgcgaagcaatatatatacagtgaacacacaataagctttgaatgttatagttttctaaaatgtataacaaatacagaaatcaattcgttcgatgagtatatattaagaggactattagaagctggtaatagtttacagatattttccaattccgtaggtaaacgaacagatactataggtgtactagggaataagtatccatttagcaaaattccattggcctcattaactcctaaagcacaacgagagatattttcagcgtggatttctcatagacctgtagttttaactggaggaactggagtgggtaagacgtcacaggtacccaagttattgctttggtttaattatttatttggtggattctctactctagataaaatcactgactttcacgaaagaccagtcattctatctcttcctaggatagctttagttagattgcatagcaataccattttaaaatcattgggatttaaggtactagatggatctcctatttctttacggtacggatctataccggaagaattaataaacaaacaaccaaaaaaatatggaattgtattttctacccataagttatctctaacaaaactatttagttatggcactcttattatagacgaagttcatgagcatgatcaaataggagatattattatagcagtagcgagaaagcatcatacgaaaatagattctatgtttttaatgactgccacgttagaggatgacagggaacggctaaaagtatttttacctaatcccgcatttatacatattcctggagatacactgtttaaaattagcgaggtatttattcataataagataaatccatcttccagaatggcatacatagaagaagaaaagagaaatttagttactgctatacagatgtatactcctcctgatggatcatccggtatagtctttgtggcatccgttgcacagtgtcacgaatataaatcatatttagaaaaaagattaccgtatgatatgtatattattcatggtaaggtcttagatatagacgaaatattagaaaaagtgtattcatcacctaatgtatcgataattatttctactccttatttggaatccagcgttactatacgcaatgttacacacatttatgatatgggtagagtttttgtccccgctccttttggaggatcgcaacaatttatttctaaatctatgagagatcaacgaaaaggaagagtaggaagagttaatcctggtacatacgtctatttctatgatctgtcttatatgaagtctatacagcgaatagattcagaatttctacataattatatattgtacgctaataagtttaatctaacactccccgaagatttgtttataatccctacaaatttggatattctatggcgtacaaaggaatatatagactcgttcgatattagtacagaaacatggaataaattattatccaattattatatgaagatgatagagtatgctaaactttatgtactaagtcctattctcgctgaggagttggataactttgagaggacgggagaattaactagtattgtacgagaagccattttatctctaaatttacaaattaagattttaaattttaaacataaagatgatgatacgtatatacacttttgtaaaatattattcggtgtctataacggaacaaacgctactatatattatcatagacctctaacgggatatatgaatatgatttcagatactatatttgttcctgtagataataactaaaaatcaaactctaatgaccacatctttttttagagatgaaaaattttccacatctccttttgtagacacgactaaacattttgcagaaaaaagtttattagtgtttagataatcgtatacttcatcagtgtagatagtaaatgtgaacagataaaaggtattcttgctcaatagattggtaaattccatagaatatattaatcctttcttcttgagatcccacatcatttcaaccagagacgttttatccaatgatttacctcgtactataccacatacaaaactagattttgcagtgacgtcgtacctggtattcctaccaaacaaaattttacttttagttcttttagaaaattctaaggtagaatctctatttgccaatatgtcatctatggaattaccactagcaaaaaatgatagaaatatatattgatacatcgcagctggttttgatctactatactttaaaaacgaatcagattccataattgcctgtatatcatcagctgaaaaactatgttttacacgtattccttcggcatttctttttaatgatatatcttgtttagacaatgataaagttatcatgtccatgagagacgcgtctccgtatcgtataaatatttcattagatgttagacgcttcattaggggtatacttctataaggtttcttaatcagtccatcattggttgcgtcaagaactactatcggatgttgttgggtatctctagtgttacacatggccttactaaagtttgggtaaataactatgatatctctattaattatagatgcatatatttcattcgtcaaggatattagtatcgacttgctatcgtcattaatacgtgtaatgtaatcatataaatcatgcgatagccaaggaaaatttaaatagatgttcatcatataatcgtcgctataattcatattaatacgttgacattgactaatttgtaatatagcctcgccacgaagaaagctctcgtattcagtttcatcgataaaggataccgttaaatataactggttgccgatagtctcatagtctattaagtggtaagtttcgtacaaatacagaatccctaaaatattatctaatgttggattaatctttaccataactgtataaaatggagacggagtcataactattttaccgtttgtacttactggaatagatgaaggaataatctccggacatgctggtaaagacccaaatgtctgtttgaagaaatccaatgttccaggtcctaatctcttaacaaaaattacgatattcgatcccgatatcctttgcattctatttaccagcatatcacgaactatattaagattatctatcatgtctattctcccaccgttatataaatcgcctccgctaagaaacgttagtatatccatacaatggaatacttcatttctaaaatagtattcgttttctaattctttaatgtgaaatcgtatactagaaagggaaaaattatctttgagttttccgttagaaaagaaccacgaaactaatgttctgattgcgtccgattccgttgctgaattaatggatttacaccaaaaactcatataacttctagatgtagaagcattcgctaaaaaattagtagaatcaaaggatataagtagatgttccaacaagtgagcaattcccaagatttcatctatatcattctcgaatccgaaattagaaattcccaagtagatatcctttttcatccgatcgttgatgaaaatacgaactttattcggtaagacaatcatttactaaggagtaaaataggaagtaatgttcgtatgtcgttatcatcgtataaattaaaggtgtgttttttaccattaagtgacattataattttaccaatattggaattataatataggtgtatttgcgcactcgcgacggttgatgcatcggtaaatatagctgtatctaatgttctagtcggtatttcatcatttcgctgtctaataatagcgttttctctatctgtttccattacagctgcctgaagtttattggtcggataatatgtaaaataataagaaatacatacgaataacaaaaataaaataagatataataaagatgccatttagagatctaattttgtttaacttgtccaaattcctacttacagaagatgaggaatcgttggagatagtgtcttccttatgtagaggatttgaaatatcttataatgacttgataacttactttccagataggaaataccataaatatatttataaagtatttgaacatgtagatttatcggaggaattaagtatggaattccatgatacaactctgagagatttagtctatcttagattgtacaagtattccaagtgtatacggccgtgttataaattaggagataatctaaaaggcatagttgttataaaggacaggaatatttatattagggaagcaaatgatgacttgatagaatatctcctcaaggaatacactcctcagatttatacatattctaatgagcgcgtccccataactggttcaaaattaattctttgtggattttctcaagttacatttatggcgtatacaacgtcgcatataacaacaaataaaaaggtagatgttctcgtttccaaaaaatgtatagatgaactagtcgatccaataaattatcaaatacttcaaaatttatttgataaaggaagcggaacaataaacaaaatactcaggaagatattttattcggtaacaggtggccaaactccataggtagctttttctatttcggattttagaatttccaaattcaccagcgatttatcggttttggtgaaatccaaggatttattaatgtccacaaatgccatttgttttgtctgtggattgtatttgaaaatggaaacgatgtagttagatagatgcgctgcgaagtttcctattagggttccgcgcttcacgtcacccagcatacttgaatcaccatcctttaaaaaaaatgataagatatcaacatggagtatatcatactcgaattttaattcttctactgactcactgacattttcacaaatactacaatacggtttaccgaaaataatcagtacgttcttcatttatgggtatcaaaaacttaaaatcgttactgctggaaaataaatcactgacgatattagatgataatttatacaaagtatacaatggaatatttgtggatacaatgagtatttatatagccgtcgccaattgtgtcagaaacttagaagagttaactacggtattcataaaatacgtaaacggatgggtaaaaaagggagggcatgtaaccctttttatcgatagaggaagtataaaaattaaacaagacgttagagacaagagacgtaaatattctaaattaaccaaggacagaaaaatgttagaattagaaaagtgtacatccgaaatacaaaatgttaccggatttatggaagaagaaataaaggcagaaatgcaattaaaaatcgataaactcacatttcaaatatatttatctgattctgataacataaaaatatcattgaatgagatactaacacatttcaacaataatgagaatgttacattattttattgtgatgaacgagacgcagaattcgttatgtgtctcgaggctaaaacacatttctctaccacaggagaatggccgttgataataagtaccgatcaggatactatgctatttgcatctgctgataatcatcctaagatgataaaaaacttaactcaactgtttaaatttgttccctcggcagaggataactatttagcaaaattaacggcgttagtgaatggatgtgatttctttcctggactctatggggcatctataacacccaccaacttaaacaaaatacaattgtttagtgattttacaatcgataatatagtcactagtttggcaattaaaaattattatagaaagactaactctaccgtagacgtgcgtaatattgttacgtttataaacgattacgctaatttagacgatgtctactcgtatattcctccttgtcaatgcactgttcaagaatttatattttccgcattagatgaaaaatggaatgaatttaaatcatcttatttagaaagcgtgccgttaccctgccaattaatgtacgcgttagaaccacgcaaggagattgatgtttcagaagttaaaactttatcatcttatatagatttcgaaaatactaaatcagatatcgatgttataaaatctatatcctcgatcttcggatattctaacgaaaactgtaacacgatagtattcggcatctataaggataatttactactgagtataaataattcattttactttaacgatagtctgttaataaccaatactaaaagtgataatataataaatataggttactagattaaaaatggtgttccaactcgtgtgctctacatgcggtaaagatatttctcacgaacgatataaattgattatacgaaaaaaatcattaaaggatgtactcgtcagtgtaaagaacgaatgttgtaggttaaaattatctacacaaatagaacctcaacgtaacttaacagtgcaacctctattggatataaactaatatggatccggttaattttatcaagacatatgcgcctagaggttctattatttttattaattataccatgtcattaacaagtcatttgaatccatcgatagaaaaacatgtgggtatttattatggtacgttattatcggaacacttggtagttgaatctacctatagaaaaggagttcgaatagtcccattggatagtttttttgaaggatatcttagtgcaaaagtatacatgttagagaatattcaagttatgaaaatagcagctgatacgtcattaactttattgggtattccgtatggatttggtcatgatagaatgtattgttttaaattggtagctgactgttataaaaatgccggtattgatacatcgtctaaacgaatattgggcaaagatatttttctgagccaaaacttcacagacgataatagatggataaagatatatgattctaataatttaacattttggcaaattgattaccttaaagggtgagttaatatgcataactactcctccgttgttttttccctcgttctttttcttaacgttgtttgccatcactctcataatgtaaagatattctaaaatggtaaacttttgcatatcggacgcagaaattggtataaatgttgtaattgtattatttcccgtcaatggactagtcacagctccatcagttttatatcctttagagtatttctcactcgtgtctaacattctagagcattccatgatctgtttatcgttgatattggccggaaagatagattttttattttttattatattactattggcaattgtagatataacttctggtaaatatttttctaccttttcaatctcttctattttcaagccggctatatattctgctatattgttgctagtatcaataccttttctggctaagaagtcatatgtggtattcactatatcagttttaactggtagttccattagcctttccacttctgcagaataatcagaaattggttctttaccagaaaatccagctactataataggctcaccgatgatcattggcaaaatcctatattgtaccagattaatgagagcatatttcatttccaataattctgctagttcttgagacattgatttatttgatgaatctagttggttctctagatactctaccatttctgccgcatacaataacttgttagataaaatcagggttatcaaagtgtttagcgtggctagaatagtgggcttgcatgtattaaagaatgcggtagtatgagtaaaccgttttaacgaattatatagtctccagaaatctgtggcgttacatacatgagccgaatgacatcgaagattgtccaatatttttaatagctgctctttgtccattatttctatatttgactcgcaacaattgtagataccattaatcaccgattcctttttcgatgccggacaatagcacaattgtttagctttggactctatgtattcagaattaatagatatatctctcaatacagattgcactatacattttgaaactatgtcaaaaattgtagaacgacgctgttctgcagccatttaactttaaataatttacaaaaatttaaaatgagcatccgtataaaaatcgataaactgcgccaaattgtggcatatttttcagagttcagtgaagaagtgtctataaatgtagactcgacggatgagttaatgtatatttttgccgccttgggcggatctgtaaacatttgggcaattatacctctaagtgcatcagtgttttaccgaggagccgaaaatattgtgtttaatcttcctgtgtccaaggtaaaatcgtgtttgtgtagttttcacaatgatgccatcatagatatagaacctgatctggaaaataatctagtaaaactttctagttatcatgtagtaagtgtcgattgtaacaaggaactgatgcctattaggacagatactactatttgtctaagtatagatcaaaagaaatcttacgtgtttaattttcacaagtatgaagaaaaatgttgtggtagaaccgtcattcatctagaatggttgttgggctttatcaagtgtattagtcagcatcagcatctggctattatgtttaaagatgacaatattattatgaagactcctggtaatactgatgcgttttccagggaatattctatgactgaatgttctcaagaactacaaaagttttctttcaaaatagctatctcgtctctcaacaaactacgaggattcaaaaagagagtcaatgtttttgaaactagaatcgtaatggataatgacgataacattttaggaatgttgttttcggatagagttcaatcctttaagatcaacatctttatggcgtttttagattaatactttcaatgagataaatatgggtggcggagtaagtgttgagctccctaaacgggatccgcctccgggagtacccactgatgagatgttattaaacgtggataaaatgcatgacgtgatagctcccgctaagcttttagaatatgtgcatataggaccactagcaaaagataaagaggataaagtaaagaaaagatatccagagtttagattagtcaacacaggacccggtggtctttcggcattgttaagacaatcgtataatggaaccgcacccaattgctgtcgcacttttaatcgtactcattattggaagaaggatggaaagatatcagataagtatgaagagggtgcagtattagaatcgtgttggccagacgttcacgacactggaaaatgcgatgttgatttattcgactggtgtcagggggatacgttcgatagaaacatatgccatcagtggatcggttcagcctttaataggagtaatagaactgtagagggtcaacaatcgttaataaatctgtataataagatgcaaacattatgtagtaaagatgctagtgtaccaatatgcgaatcatttttgcattatttacgcgcacacaatacagaagatagcaaagagatgatcgattatattctaagacaacagtctgcggactttaaacagaaatatatgagatgtagttatcccactagagataagttagaagagtcattaaaatatgcggaacctcgagaatgttgggatccagagtgttcgaatgccaatgttaatttcttactaacacgtaattataataatttaggactttgcaatattgtacgatgtaataccagcgtgaacaacttacagatggataaaacttcctcattaagattgtcatgtggattaagcaatagtgatagattttctactgttcccgtcaatagagcaaaagtagttcaacataatattaaacactcgttcgacctaaaattgcatttgatcagtttattatctctcttggtaatatggatactaattgtagctatttaaatgggtgccgcggcaagcatacagacgacggtgaatacactcagcgaacgtatctcgtctaaattagaacaagaagcgaacgctagtgctcaaacaaaatgtgatatagaaatcggaaatttttatatccgacaaaaccatggatgtaacctcactgttaaaaatatgtgctctgcggacgcggatgctcagttggatgctgtgttatcagccgctacagaaacatatagtggattaacaccggaacaaaaagcatacgtgccagctatgtttactgctgcgttaaacattcagacgagtgtaaacactgttgttagagattttgaaaattatgtgaaacagacttgtaattctagcgcggtcgtcgataacaaattaaagatacaaaacgtaatcatagatgaatgttacggagccccaggatctccaacaaatttggaatttattaatacaggatctagcaaaggaaattgtgccattaaagcgttgatgcaattgacgactaaggccactactcaaatagcacctagacaagttgctggtacaggagttcagttttatatgattgttatcggtgttataatattggcagcgttgtttatgtactatgccaagcgtatgttgttcacatccaccaatgataaaatcaaacttattttagccaataaggaaaacgtccattggactacttacatggacacattctttagaacttctccgatggttattgctaccacggatatgcaaaactgaaaatatattgataatattttaatagattaacatggaagttatcgctgatcgtctagacgatatagtgaaacaaaatatagcggatgaaaaatttgtagattttgttatacacggtctagagcatcaatgtcctgctatacttcgaccattaattaggttgtttattgatatactattatttgttatagtaatttatatttttacggtacgtctagtaagtagaaattatcaaatgttgttggtggtgctagtcatcacattaactattttttattactttatactataatagtactagactgacttctaacaaacatctcacctgccataaataaatgcttgatattaaagtcttctatttctaacactattccatctgtggaaaataatactctgacattatcgctaattgacacatcggtgagtgatatgcctataaagtaataatcttctttgggcacatataccagtgtaccaggttctaacaacctatttactggtgctcctgtagcatactttttctttaccttgagaatatccatcgtttgcttggtcaatagcgatatgtgattttttatcaaccactcaaaaaagtaattggagtgttcatatcctctacgggctattgtctcatggccgtgtatgaaatttaagtaacacgactgtggtagatttgttctatagagccgattgccgcaaatagatagaactaccaatatgtctgtacaaatgttaaacattaattgattaacagaaaaaacaatgttcgttctgggaatagaaaccagatcaaaacaaaattcgttagaatatatgccacgtttatacatggaatataaaataactacagtttgaaaaataacagtatcatttaaacatttaacttgcggggttaatctcacaactttactgtttttgaactgttcaaaatatagcatcgatccgtgagaaatacgtttagccgcctttaatagaggaaatcccaccgcctttctggatctcaccaacgacgatagttctgaccagcaactcatttcttcatcatccacctgttttaacatataataggcaggagatagatatccgtcattgcaatattccttctcgtaggcacacaatctaatattgataaaatctccattctcttctctgcatttattatcttgtctcggtggctgattaggctgtggtcttggtttaggccttggtctatcgttgttgaatctattttggtcattaaatctttcatttcttcctggtatatttctatcacctcgtttggttggatttttgtctatattatcgtttgtaacatcggtacgggtattcatttatcacaaaaaaaacttctctaaatgagtctactgctagaaaacctcatcgaagaagataccatattttttgcaggaagtatatctgagtatgatgatttacaaatggttattgccggcgcaaaatccaaatttccaagatctatgctttctatttttaatatagtacctagaacgatgtcaaaatatgagttggagttgattcataacgaaaatatcacaggagcaatgtttaccacaatgtataatataagaaacaatttgggtctaggagatgataaactaactattgaagccattgaaaactatttcttggatcctaacaatgaagttatgcctcttattattaataatacggatatgactgccgtcattcctaaaaaaagtggtaggagaaagaataagaacatggttatcttccgtcaaggatcatcacctatcttgtgcattttcgaaactcgtaaaaagattaatatttataaagaaaatatggaatccgcgtcgactgagtatacacctatcggagacaacaaggctttgatatctaaatatgcgggaattaatgtcctgaatgtgtattctccttccacatccataagattgaatgccatttacggattcaccaataaaaataaactagagaaacttagtactaataaggaactagaatcgtatagttctagccctcttcaagaacccattaggttaaatgattttctgggactattggaatgtgttaaaaagaatattcctctaacagatattccgacaaaggattgattactataaatggagaatgttcctaatgtatactttaatcctgtgtttatagagcccacgtttaaacattctttattaagtgtttataaacacagattaatagttttatttgaagtattcgttgtattcattctaatatatgtattttttagatctgaattaaatatgttcttcatgcctaaacgaaaaatacccgatcctattgatagattacgacgtgctaatctagcgtgtgaagacgataaattaatgatctatggattaccatggatgacaactcaaacatctgcgttatcaataaatagtaaaccgatagtgtataaagattgtgcaaagcttttgcgatcaataaatggatcacaaccagtatctcttaacgatgttcttcgcagatgatgattcattttttaagtatttggctagtcaagatgatgaatcttcattatctgatatattgcaaatcactcaatatctagactttctgttattattattgatccaatcaaaaaataaattagaagctgtgggtcattgttatgaatctctttcagaggaatacagacaattgacaaaattcacagactttcaagattttaaaaaactgtttaacaaggtccctattgttacagatggaagggtcaaacttaataaaggatatttgttcgactttgtgattagtttgatgcgattcaaaaaagaatcctctctagctaccaccgcaatagatcctgttagatacatagatcctcgtcgcaatatcgcattttctaacgtgatggatatattaaagtcgaataaagtgaacaataattaattctttattgtcatcatgaacggcggacatattcagttgataatcggccccatgttttcaggtaaaagtacagaattaattagacgagttagacgttatcaaatagctcaatataaatgcgtgactataaaatattctaacgataatagatacggaacgggactatggacgcatgataagaataattttgaagcattggaagcaactaaactatgtgatgtcttggaatcaattacagatttctccgtgataggtatcgatgaaggacagttctttccagacattgttgaattagatcgataaaaattaattaattacccgggtaccaggcctagatctgtcgagatccggtggtggtgcaaatcaaagaactgctcctcagtggatgttgcctttacttctaggcctgtacggaagtgttacttctgctctaaaagctgctgcagggggggggggggggtgggggggccggttagggccgccatcccctcagagcgtcgggatatcgggtggcggctcgggacggaggacgcgctagtgttcttctgtgtggcagttcagaatgatggatcaagctagatcagcattctctaacttgtttggtggagaaccattgtcatatacccggttcagcctggctcggcaagtagatggcgataacagtcatgtggagatgaaacttgctgtagatgaagaagaaaatgctgacaataacacaaaggccaatgtcacaaaaccaaaaaggtgtagtggaagtatctgctatgggactattgctgtgatcgtctttttcttgattggatttatgattggctacttgggctattgtaaaggggtagaaccaaaaactgagtgtgagagactggcaggaaccgagtctccagtgagggaggagccaggagaggacttccctgcagcacgtcgcttatattgggatgacctgaagagaaagttgtcggagaaactggacagcacagacttcaccagcaccatcaagctgctgaatgaaaattcatatgtccctcgtgaggctggatctcaaaaagatgaaaatcttgcgttgtatgttgaaaatcaatttcgtgaatttaaactcagcaaagtctggcgtgatcaacattttgttaagattcaggtcaaagacagcgctcaaaactcggtgatcatagttgataagaacggtagacttgtttacctggtggagaatcctgggggttatgtggcgtatagtaaggctgcaacagttactggtaaactggtccatgctaattttggtactaaaaaagattttgaggatttatacactcctgtgaatggatctatagtgattgtcagagcagggaaaatcacctttgcagaaaaggttgcaaatgctgaaagcttaaatgcaattggtgtgttgatatacatggaccagactaaatttcccattgttaacgcagaactttcattctttggacatgctcatctggggacaggtgacccttacacacctggattcccttccttcaatcacactcagtttccaccatctcggtcatcaggattgcctaatatacctgtccagacaatctccagagctgctgcagaaaagctgtttgggaatatggaaggagactgtccctctgactggaaaacagactctacatgtaggatggtaacctcagaaagcaagaatgtgaagctcactgtgagcaatgtgctgaaagagataaaaattcttaacatctttggagttattaaaggctttgtagaaccagatcactatgttgtagttggggcccagagagatgcatggggccctggagctgcaaaatccggtgtaggcacagctctcctattgaaacttgcccagatgttctcagatatggtcttaaaagatgggtttcagcccagcagaagcattatctttgccagttggagtgctggagactttggatcggttggtgccactgaatggctagagggatacctttcgtccctgcatttaaaggctttcacttatattaatctggataaagcggttcttggtaccagcaacttcaaggtttctgccagcccactgttgtatacgcttattgagaaaacaatgcaaaatgtgaagcatccggttactgggcaatttctatatcaggacagcaactgggccagcaaagttgagaaactcactttagacaatgctgctttccctttccttgcatattctggaatcccagcagtttctttctgtttttgcgaggacacagattatccttatttgggtaccaccatggacacctataaggaactgattgagaggattcctgagttgaacaaagtggcacgagcagctgcagaggtcgctggtcagttcgtgattaaactaacccatgatgttgaattgaacctggactatgagaggtacaacagccaactgctttcatttgtgagggatctgaaccaatacagagcagacataaaggaaatgggcctgagtttacagtggctgtattctgctcgtggagacttcttccgtgctacttccagactaacaacagatttcgggaatgctgagaaaacagacagatttgtcatgaagaaactcaatgatcgtgtcatgagagtggagtatcacttcctctctccctacgtatctccaaaagagtctcctttccgacatgtcttctggggctccggctctcacacgctgccagctttactggagaacttgaaactgcgtaaacaaaataacggtgcttttaatgaaacgctgttcagaaaccagttggctctagctacttggactattcagggagctgcaaatgccctctctggtgacgtttgggacattgacaatgagttttaaatgtgatacccatagcttccatgagaacagcagggtagtctggtttctagacttgtgctgatcgtgctaaattttcagtagggctacaaaacctgatgttaaaattccatcccatcatcttggtactactagatgtctttaggcagcagcttttaatacagggtagataacctgtacttcaagttaaagtgaataaccacttaaaaaatgtccatgatggaatattcccctatctctagaattttaagtgctttgtaatgggaactgcctctttcctgttgttgttaatgaaaatgtcagaaaccagttatgtgaatgatctctctgaatcctaagggctggtctctgctgaaggttgtaagtggtcgcttactttgagtgatcctccaacttcatttgatgctaaataggagataccaggttgaaagaccttctccaaatgagatctaagcctttccataaggaatgtagctggtttcctcattcctgaaagaaacagttaactttcagaagagatgggcttgttttcttgccaatgaggtctgaaatggaggtccttctgctggataaaatgaggttcaactgttgattgcaggaataaggccttaatatgttaacctcagtgtcatttatgaaaagaggggaccagaagccaaagacttagtatattttcttttcctctgtcccttcccccataagcctccatttagttctttgttatttttgtttcttccaaagcacattgaaagagaaccagtttcaggtgtttagttgcagactcagtttgtcagactttaaagaataatatgctgccaaattttggccaaagtgttaatcttaggggagagctttctgtccttttggcactgagatatttattgtttatttatcagtgacagagttcactataaatggtgtttttttaatagaatataattatcggaagcagtgccttccataattatgacagttatactgtcggttttttttaaataaaagcagcatctgctaataaaacccaacagatactggaagttttgcatttatggtcaacacttaagggttttagaaaacagccgtcagccaaatgtaattgaataaagttgaagctaagatttagagatgaattaaatttaattaggggttgctaagaagcgagcactgaccagataagaatgctggttttcctaaatgcagtgaattgtgaccaagttataaatcaatgtcacttaaaggctgtggtagtactcctgcaaaattttatagctcagtttatccaaggtgtaactctaattcccattttgcaaaatttccagtacctttgtcacaatcctaacacattatcgggagcagtatcttccataatgtataaagaacaaggtagtttttacctaccacagtgtctgtatcggagacagtgatctccatatgttacactaagggtgtaagtaattatcgggaacagtgtttcccataattttcttcatgcaatgacatcttcaaagcttgaagatcgttagtatctaacatgtatcccaactcctataattccctatcttttagttttagttgcagaaacattttgtggtcattaagcattgggtgggtaaattcaaccactgtaaaatgaaattactacaaaatttgaaatttagcttgggtttttgttacctttatggtttctccaggtcctctacttaatgagatagtagcatacatttataatgtttgctattgacaagtcattttaactttatcacattatttgcatgttacctcctataaacttagtgcggacaagttttaatccagaattgaccttttgacttaaagcagagggactttgtatagaaggtttgggggctgtggggaaggagagtcccctgaaggtctgacacgtctgcctacccattcgtggtgatcaattaaatgtaggtatgaataagttcgaagctccgtgagtgaaccatcattataaacgtgatgatcagctgtttgtcatagggcagttggaaacggcctcctagggaaaagttcatagggtctcttcaggttcttagtgtcacttacctagatttacagcctcacttgaatgtgtcactactcacagtctctttaatcttcagttttatctttaatctcctcttttatcttggactgacatttagcgtagctaagtgaaaaggtcatagctgagattcctggttcgggtgttacgcacacgtacttaaatgaaagcatgtggcatgttcatcgtataacacaatatgaatacagggcatgcattttgcagcagtgagtctcttcagaaaacccttttctacagttagggttgagttacttcctatcaagccagtacgtgctaacaggctcaatattcctgaatgaaatatcagactagtgacaagctcctggtcttgagatgtcttctcgttaaggagatgggccttttggaggtaaaggataaaatgaatgagttctgtcatgattcactattctagaacttgcatgacctttactgtgttagctctttgaatgttcttgaaattttagactttctttgtaaacaaatgatatgtccttatcattgtataaaagctgttatgtgcaacagtgtggagattccttgtctgatttaataaaatacttaaacactgaaaaaaaaaaaaaaaaaaaaaaaaaaaaaaaaaaaaaaaaaaaaaaaaaaaaaaaaaaaaaaaaaaaaaaaaaaaaaaaaagtaccttctgaggcggaaagaaccagccggatctcgacttcgagcttatttatattccaaaaaaaaaaaataaaatttcaatttttaagctttcactaattccaaacccacccgctttttatagtaagtttttcacccataaataataaatacaataattaatttctcgtaaaagtagaaaatatattctaatttattgcacggtaaggaagtagatcataactcgagcatgggagatcccgtcgttttacaacgtcgtgactgggaaaaccctggcgttacccaacttaatcgccttgcagcacatccccctttcgccagctggcgtaatagcgaagaggcccgcaccgatcgcccttcccaacagttgcgcagcctgaatggcgaatggcgctttgcctggtttccggcaccagaagcggtgccggaaagctggctggagtgcgatcttcctgaggccgatactgtcgtcgtcccctcaaactggcagatgcacggttacgatgcgcccatctacaccaacgtgacctatcccattacggtcaatccgccgtttgttcccacggagaatccgacgggttgttactcgctcacatttaatgttgatgaaagctggctacaggaaggccagacgcgaattatttttgatggcgttaactcggcgtttcatctgtggtgcaacgggcgctgggtcggttacggccaggacagtcgtttgccgtctgaatttgacctgagcgcatttttacgcgccggagaaaaccgcctcgcggtgatggtgctgcgctggagtgacggcagttatctggaagatcaggatatgtggcggatgagcggcattttccgtgacgtctcgttgctgcataaaccgactacacaaatcagcgatttccatgttgccactcgctttaatgatgatttcagccgcgctgtactggaggctgaagttcagatgtgcggcgagttgcgtgactacctacgggtaacagtttctttatggcagggtgaaacgcaggtcgccagcggcaccgcgcctttcggcggtgaaattatcgatgagcgtggtggttatgccgatcgcgtcacactacgtctgaacgtcgaaaacccgaaactgtggagcgccgaaatcccgaatctctatcgtgcggtggttgaactgcacaccgccgacggcacgctgattgaagcagaagcctgcgatgtcggtttccgcgaggtgcggattgaaaatggtctgctgctgctgaacggcaagccgttgctgattcgaggcgttaaccgtcacgagcatcatcctctgcatggtcaggtcatggatgagcagacgatggtgcaggatatcctgctgatgaagcagaacaactttaacgccgtgcgctgttcgcattatccgaaccatccgctgtggtacacgctgtgcgaccgctacggcctgtatgtggtggatgaagccaatattgaaacccacggcatggtgccaatgaatcgtctgaccgatgatccgcgctggctaccggcgatgagcgaacgcgtaacgcgaatggtgcagcgcgatcgtaatcacccgagtgtgatcatctggtcgctggggaatgaatcaggccacggcgctaatcacgacgcgctgtatcgctggatcaaatctgtcgatccttcccgcccggtgcagtatgaaggcggcggagccgacaccacggccaccgatattatttgcccgatgtacgcgcgcgtggatgaagaccagcccttcccggctgtgccgaaatggtccatcaaaaaatggctttcgctacctggagagacgcgcccgctgatcctttgcgaatacgcccacgcgatgggtaacagtcttggcggtttcgctaaatactggcaggcgtttcgtcagtatccccgtttacagggcggcttcgtctgggactgggtggatcagtcgctgattaaatatgatgaaaacggcaacccgtggtcggcttacggcggtgattttggcgatacgccgaacgatcgccagttctgtatgaacggtctggtctttgccgaccgcacgccgcatccagcgctgacggaagcaaaacaccagcagcagtttttccagttccgtttatccgggcaaaccatcgaagtgaccagcgaatacctgttccgtcatagcgataacgagctcctgcactggatggtggcgctggatggtaagccgctggcaagcggtgaagtgcctctggatgtcgctccacaaggtaaacagttgattgaactgcctgaactaccgcagccggagagcgccgggcaactctggctcacagtacgcgtagtgcaaccgaacgcgaccgcatggtcagaagccgggcacatcagcgcctggcagcagtggcgtctggcggaaaacctcagtgtgacgctccccgccgcgtcccacgccatcccgcatctgaccaccagcgaaatggatttttgcatcgagctgggtaataagcgttggcaatttaaccgccagtcaggctttctttcacagatgtggattggcgataaaaaacaactgctgacgccgctgcgcgatcagttcacccgtgcaccgctggataacgacattggcgtaagtgaagcgacccgcattgaccctaacgcctgggtcgaacgctggaaggcggcgggccattaccaggccgaagcagcgttgttgcagtgcacggcagatacacttgctgatgcggtgctgattacgaccgctcacgcgtggcagcatcaggggaaaaccttatttatcagccggaaaacctaccggattgatggtagtggtcaaatggcgattaccgttgatgttgaagtggcgagcgatacaccgcatccggcgcggattggcctgaactgccagctggcgcaggtagcagagcgggtaaactggctcggattagggccgcaagaaaactatcccgaccgccttactgccgcctgttttgaccgctgggatctgccattgtcagacatgtataccccgtacgtcttcccgagcgaaaacggtctgcgctgcgggacgcgcgaattgaattatggcccacaccagtggcgcggcgacttccagttcaacatcagccgctacagtcaacagcaactgatggaaaccagccatcgccatctgctgcacgcggaagaaggcacatggctgaatatcgacggtttccatatggggattggtggcgacgactcctggagcccgtcagtatcggcggaattccagctgagcgccggtcgctaccattaccagttggtctggtgtcaaaaataataataaccgggcaggggggatccaattctgtgagcgtatggcaaacgaaggaaaaatagttatagtagccgcactcgatgggacatttcaacgtaaaccgtttaataatattttgaatcttattccattatctgaaatggtggtaaaactaactgctgtgtgtatgaaatgctttaaggaggcttccttttctaaacgattgggtgaggaaaccgagatagaaataataggaggtaatgatatgtatcaatcggtgtgtagaaagtgttacatcgactcataatattatattttttatctaaaaaactaaaaataaacattgattaaattttaatataatacttaaaaatggatgttgtgtcgttagataaaccgtttatgtattttgaggaaattgataatgagttagattacgaaccagaaagtgcaaatgaggtcgcaaaaaaactgccgtatcaaggacagttaaaactattactaggagaattattttttcttagtaagttacagcgacacggtatattagatggtgccaccgtagtgtatataggatctgctcccggtacacatatacgttatttgagagatcatttctataatttaggagtgatcatcaaatggatgctaattgacggccgccatcatgatcctattttaaatggattgcgtgatgtgactctagtgactcggttcgttgatgaggaatatctacgatccatcaaaaaacaactgcatccttctaagattattttaatttctgatgtgagatccaaacgaggaggaaatgaacctagtacggcggatttactaagtaattacgctctacaaaatgtcatgattagtattttaaaccccgtggcgtctagtcttaaatggagatgcccgtttccagatcaatggatcaaggacttttatatcccacacggtaataaaatgttacaaccttttgctccttcatattcagctgaaatgagattattaagtatttataccggtgagaacatgagactgactcgagttaccaaattagacgctgtaaattatgaaaaaaagatgtactaccttaataagatcgtccgtaacaaagtagttgttaactttgattatcctaatcaggaatatgactattttcacatgtactttatgctgaggaccgtgtactgcaataaaacatttcctactactaaagcaaaggtactatttctacaacaatctatatttcgtttcttaaatattccaacaacatcaactgaaaaagttagtcatgaaccaatacaacgtaaaatatctagcaaaaattctatgtctaaaaacagaaatagcaagagatccgtacgcggtaataaatagaaacgtactactgagatatactaccgatatagagtataatgatttagttactttaataaccgttagacataaaattgattctatgaaaactgtgtttcaggtatttaacgaatcatccataaattatactccggttgatgatgattatggagaaccaatcattataacatcgtatcttcaaaaaggtcataacaagtttcctgtaaattttctatacatagatgtggtaatatctgacttatttcctagctttgttagactagatactacagaaactaatatagttaatagtgtactacaaacaggcgatggtaaaaagactcttcgtcttcccaaaatgttagagacggaaatagttgtcaagattctctatcgccctaatataccattaaaaattgttagatttttccgcaataacatggtaactggagtagagatagccgatagatctgttatttcagtcgctgattaatcaattagtagagatgagataagaacattataataatcaataatatatcttatatcttatatcttatatcttatatcttgtttagaaaaatgctaatattaaaatagctaacgctagtaatccaatcggaagccatttgatatctataatagggtatctaatttcctgatttaaatagcggacagctatattctcggtagctactcgtttggaatcacaaacattatttacatctaatttactatctgtaatggaaacgtttcccaatgaaatggtacaatccgatacattgcattttgttatatttttttttaaagaggctggtaacaacgcatcgcttcgtttacatggctcgtaccaacaataatagggtaatcttgtatctattcctatccgtactatgcttttatcaggataaatacatttacatcgtatatcgtctttgttagcatcacagaatgcataaatttgttcgtccgtcatgataaaaatttaaagtgtaaatataactattatttttatagttgtaataaaaagggaaatttgattgtatactttcggttctttaaaagaaactgacttgataaaaatggctgtaatctctaaggttacgtatagtctatatgatcaaaaagagattaatgctacagatattatcattagtcatgttaaaaatgacgacgatatcggtaccgttaaagatggtagactaggtgctatggatggggcattatgtaagacttgtgggaaaacggaattggaatgtttcggtcactggggtaaagtaagtatttataaaactcatatagttaagcctgaatttatttcagaaattattcgtttactgaatcatatatgtattcactgcggattattgcgttcacgagaaccgtattccgacgatattaacctaaaagagttatcgggacacgctcttaggagattaaaggataaaatattatccaagaaaaagtcatgttggaacagtgaatgtatgcaaccgtatcaaaaaattactttttcaaagaaaaaggtttgtttcgtcaacaagttggatgatattaacgttcctaattctctcatctatcaaaagttaatttctattcatgaaaagttttggccattattagaaattcatcaatatccagctaacttattttatacagactactttcccatccctccgttgattattagaccggctattagtttttggatagatagtatacccaaagagaccaatgaattaacttacttattaggtatgatcgttaagaattgtaacttgaatgctgatgaacaggttatccagaaggcggtaatagaatacgatgatattaaaattatttctaataacactaccagtatcaatttatcatatattacatccggcaaaaataatatgattagaagttatatcgtcgcccgacgaaaagatcagaccgctagatctgtaattggtcccagtacatctatcaccgttaatgaggtaggaatgcccgcatatattagaaatacacttacagaaaagatatttgttaatgcctttacagtggataaagttaaacaactattagcgtcaaaccaagttaaattttactttaataaacgattaaaccaattaacaagaatacgccaaggaaagtttattaaaaataaaatacatttattgcctggtgattgggtagaagtagctgttcaagaatatacaagtattatttttggaagacagccgtctctacatagatacaacgtcatcgcttcatctatcagagctaccgaaggagatactatcaaaatatctcccggaattgccaactctcaaaatgctgatttcgacggggatgaggaatggatgatattagaacaaaatcctaaagctgtaattgaacaaagtattcttatgtatccgacgacgttactcaaacacgatattcatggagcccccgtttatggatctattcaagatgaaatcgtagcagcgtattcattgtttaggatacaagatctttgtttagatgaagtattgaacatcttggggaaatatggaagagagttcgatcctaaaggtaaatgtaaattcagcggtaaagatatctatacttacttgataggtgaaaagattaattatccgggtctcttaaaggatggtgaaattattgcaaacgacgtagatagtaattttgttgtggctatgaggcatctgtcattggctggactcttatccgatcataagtcgaacgtggaaggtatcaactttattatcaagtcatcttatgtttttaagagatatctatctatttacggttttggggtgacattcaaagatctgagaccaaattcgacgttcactaataaattggaggccatcaacgtagaaaaaatagaacttatcaaagaagcatacgccaaatatctcaacgatgtaagagacgggaaaatagttccattatctaaagctttagaggcggactatgtggaatccatgttatccaacttgacaaatcttaatatccgagagatagaagaacatatgagacaaacgctgatagatgatccagataataacctcctgaaaatggccaaagcgggttataaagtaaatcccacagaactaatgtatattctaggtacgtatggacaacaaaggattgatggtgaaccagcagagactcgagtattgggtagagttttaccttactatcttccagactctaaggatccagaaggaagaggttacattcttaattctttaacaaaaggattaacgggttctcaatattacttttcgatgctggttgccagatctcaatctactgatatcgtctgtgaaacatcacgtaccggaacactggctagaaaaatcattaaaaagatggaggatatggtggtcgacggatacggacaagtagttataggtaatacgctcatcaagtacgccgccaattataccaaaattctaggctcagtatgtaaacctgtagatcttatctatccagatgagtccatgacttggtatttggaaattagtgctctgtggaataaaataaaacagggattcgtttactctcagaaacagaaacttgcaaagaagacattggcgccgtttaatttcctagtattcgtcaaacccaccactgaggataatgctattaaggttaaggatctgtacgatatgattcataacgtcattgatgatgtgagagagaaatacttctttacggtatctaatatagattttatggagtatatattcttgacgcatcttaatccttctagaattagaattacaaaagaaacggctatcactatctttgaaaagttctatgaaaaactcaattatactctaggtggtggaactcctattggaattatttctgcacaggtattgtctgagaagtttacacaacaagccctgtccagttttcacactactgaaaaaagtggtgccgtcaaacaaaaacttggtttcaacgagtttaataacttgactaatttgagtaagaataagaccgaaattatcactctggtatccgatgatatctctaaacttcaatctgttaagattaatttcgaatttgtatgtttgggagaattaaatccaaacatcactcttcgaaaagaaacagataaatatgtagtagatataatagtcaatagattatacatcaagagagcagaaataaccgaattagtcgtcgaatatatgattgaacgatttatctcctttagcgtcattgtaaaggaatggggtatggagacattcattgaggacgaggataatattagatttactgtctacctaaatttcgttgaaccggaagaattgaatcttagtaagtttatgatggttcttccgggggcagccaacaagggaaagattagtaaattcaagattcctatctctgattatacgggatatgacgacttcaatcaaacaaaaaagctcaataagatgactgtagaactcatgaatctaaaagaattgggttctttcgatttggaaaacgtcaacgtgtatcctggagtatggaatacatacgatatcttcggtatcgaggccgctcgtgaatacttgtgcgaagccatgttaaacacctatggagaagggttcgattatctgtatcagccttgtgatcttctcgctagtttactatgtgctagttacgaaccagaatcagtgaataaattcaagttcggcgcagctagtactcttaagagagctacgttcggagacaataaagcattgttaaacgcggctcttcataaaaagtcagaacctattaacgataatagtagctgccacttttttagcaaggtccctaatataggaactggatattacaaatactttatcgacttgggtcttctcatgagaatggaaaggaaactatctgataagatatcttctcaaaagatcaaggaaatggaagaaacagaagacttttaattcttatcaataacatatttttctatgatctgtcttttaaacgatggattttccacaaatgcgcctctcaagtccctcatagaatgatacacgtataaaaaatatagcataggcaatgactccttatttttagacattagatatgccaaaatcatagccccgcttctatttactcccgcagcacaatgaaccaacacgggctcgtttcgttgatcacatttagataaaaaggcggttacgtcgtcaaaatatttactaatatcggtagttgtatcatctaccaacggtatatgaataatattaatattagagttaggtaatgtatatttatccatcgtcaaatttaaaacatatttgaacttaacttcagatgatggtgcatccatagcatttttataatttcccaaatacacattattggttacccttgtcattatagtgggagatttggctttgtgcatatctccagttgaacgtagtagtaagtatttatacaaacttttcttatccatttataacgtacaaatggataaaactactttatcggtaaacgcgtgtaatttagaatacgttagagaaaaggctatagtaggcgtacaagcagccaaaacatcaacacttatattctttgttattatattggcaattagtgcgctattactctggtttcagacgtctgataatccagtctttaatgaattaacgagatatatgcgaattaaaaatacggttaacgattggaaatcattaacggatagcaaaacaaaattagaaagtgatagaggtagacttctagccgctggtaaggatgatatatttgaattcaaatgtgtggatttcggcgcctattttatagctatgcgattggataagaaaacatatctgccgcaagctattaggcgaggtactggagacgcgtggatggttaaaaaggcggcaaaggtcgatccatctgctcaacaattttgtcagtatttgataaaacacaagtctaataatgttattacttgtggtaatgagatgttaaatgaattaggttatagcggttattttatgtcaccgcattggtgttccgattttagtaatatggaatagtgttagataaatgcggtaacgaatgttcctgtaaggaaccataacagcttagatttaacgttaaagatgagcataaacataataaacaaaattacaatcaaacttataacattaatatcaaacaatccaaaaaatgaaatcagtggagtagtaaacgcgtacataactcctggataacgtttagcagctgccgttcctattctagaccaaaaattcggtttcatgttttcgaaacggtattctgcaacaagtcgaggatcgtgttctacatatttggcggcattatccagtatctgcctattgatcttcatttcgttttcgattctggctatttcaaaataaaatcccgatgatagacctccagactttataatttcatctacgatgttcagcgccgtagtaactctaataatataggctgataagctaacatcataccctcctgtatatgtgaatatggcatgatttttgtccattacaagctcggttttaactttattgcctgtaataatttctctcatctgtaggatatctatttttttgtcatgcattgccttcaagacgggacgaagaaacgtaatatcctcaataacgttatcgttttctacaataactacatattctacctttttattttctaactcggtaaaaaaattagaatcccatagggctaaatgtctagcgatatttcttttcgtttcctctgtacacatagtgttacaaaaccctgaaaagaagtgagtatacttgtcatcatttctaatgtttcctccagtccactgtataaacgcataatccttgtaatgatctggatcatccttgactaccacaacatttcttttttctggcataacttcgttgtcctttacatcatcgaacttctgatcattaatatgctcatgaacattaggaaatgtttctgatggaggtctatcaataactggcacaacaataacaggagttttcaccgccgccatttagttattgaaattaatcatatacaactctttaatacgagttatattttcgtctatccattgtttcacattgacatatttcgacaaaaagatataaaatgcgtattccaatgcttctctgtttaatgaattactaaaatatacaaacacgtcactgtctggcaataaatgatatcttagaatattgtaacaatttattttgtattgcacatgttcgtgatctatgagttcttcttcgaatggcataggatctccgaatctgaaaacgtataaataggagttagaataataatatttgagagtattggtaatatataaactctttagcggtataattagtttttttctctcaatttctatttttagatgtgatggaaaaatgactaattttgtagcattagtatcatgaactctaatcaaaatcttaatatcttcgtcacacgttagctctttgaagtttttaagagatgcatcagttggttctacagatggagtaggtgcaacaattttttgttctacacatgtatgtactggagccattgttttaactataatggtgcttgtatcgaaaaactttaatgcagatagcggaagctcttcgccgcgactttctacgtcgtaattgggttctaacgccgatctctgaatggatactagttttctaagttctaatgtgattctctgaaaatgtaaatccaattcctccggcattatagatgtgtatacatcggtaaataaaactatagtatccaacgatcccttctcgcaaattctagtcttaaccaaaaaatcgtatataaccacggagatggcgtatttaagagtggattcttctaccgttttgttcttggatgtcatataggaaactataaagtccgcactactgttaagaatgattactaacgcaactatatagtttaaattaagcattttggaaacataaaataactctgtagacgatacttgactttcgaataagtttgcagacaaacgaagaaagaacagacctctcttaatttcagaagaaaactttttttcgtattcctgacgtctagagtttatatcaataagaaagttaagaattagtcggttaatgttgtatttcattacccaagtttgagatttcataatattatcaaaagacatgataatattaaagataaagcgctgactatgaacgaaatagctatatggttcgctcaagaatatagtcttgttaaacgtggaaacgataactgtatttttaatcacgtcagcggcatctaaattaaatataggtatatttattccacacactctacaatatgccacaccatcttcataataaataaattcgttagcaaaattattaattttagtgaaatagttagcgtcaactttcatagcttccttcaatctaatttgatgctcacacggtgcgaattccactctaacatcccttttccatgcctcaggttcatcgatctctataatatctagttttttgcgtttcacaaacacaggctcgtctctcgcgatgagatctgtatagtaactatgtaaatgataactagatagaaagatgtagctatatagatgacgatcctttaagagaggtataataactttaccccaatcagatagactgttgttatggtcttcggaaaaagaatttttataaatttttccagtattttccaaatatacgtacttaacatctaaaaaatccttaatgataataggaatggataatccgtctattttataaagaaatacatatcgcacattatacttttttttggaaatgggaataccgatgtgtctacataaatatgcaaagtctaaatattttttagagaatcttagttggtccaaattcttttccaagtacggtaatagatttttcatattgaacggtatcttcttaatctctggttctagttccgcattaaatgatgaaactaagtcactatttttataactaacgattacatcacctctaacatcatcatttaccagaatactgatcttcttttgtcgtaaatacatgtctaatgtgttaaaaaaaagatcatacaagttatacgtcatttcatctgtggtattcttgtcattgaaggataaactcgtactaatctcttctttaacagcctgttcaaatttatatcctatatacgaaaaaatagcaaccagtgtttgatcatccgcgtcaatattctgttctatcgtagtgtataacaatcgtatatcttcttctgtgatagtcgatacgttataaaggttgataacgaaaatatttttatttcgtgaaataaagtcatcgtaggattttggacttatattcgcgtctagtagatatgcttttatttttggaatgatctcaattagaatagtctctttagagtccatttaaagttacaaacaactaggaaattggtttatgatgtataatttttttagtttttatagattctttattctatacttaaaaaatgaaaataaatacaaaggttcttgagggttgtgttaaattgaaagcgagaaataatcataaattatttcattatcgcgatatccgttaagtttgtatcgtaatggcgtggtcaattacgaataaagcggatactagtagcttcacaaagatggctgaaatcagagctcatctaaaaaatagcgctgaaaataaagataaaaacgaggatattttcccggaagatgtaataattccatctactaagcccaaaaccaaacgagccactactcctcgtaaaccagcggctactaaaagatcaaccaaaaaggaggaagtggaagaagaagtagttatagaggaatatcatcaaacaactgaaaaaaattctccatctcctggagtcagcgacattgtagaaagcgtggccgctgtagagctcgatgatagcgacggggatgatgaacctatggtacaagttgaagctggtaaagtaaatcatagtgctagaagcgatctctctgacctaaaggtggctaccgacaatatcgttaaagatcttaagaaaattattactagaatctctgcagtatcgacggttctagaggatgttcaagcagctggtatctctagacaatttacttctatgactaaagctattacaacactatctgatctagtcaccgagggaaaatctaaagttgttcgtaaaaaagttaaaacttgtaagaagtaaatgcgtgcacttttttataaagatggtaaactctttaccgataataattttttaaatcctgtatcagacgataatccagcgtatgaggttttgcaacatgttaaaattcctactcatttaacagatgtagtagtatatgaacaaacgtgggaggaggcgttaactagattaatttttgtgggaagtgattcaaaaggacgtagacaatacttttacggaaaaatgcatgtacagaatcgcaacgctaaaagagatcgtatttttgttagagtatataacgttatgaaacgaattaattgttttataaacaaaaatataaagaaatcgtccacagattccaattatcagttggcggtttttatgttaatggaaactatgttttttattagatttggtaaaatgaaatatcttaaggagaatgaaacagtagggttattaacactaaaaaataaacacatagaaataagtcccgatgaaatagttatcaagtttgtaggaaaggacaaagtttcacatgaatttgttgttcataagtctaatagactatataaaccgctattgaaactgacggatgattctagtcccgaagaatttctgttcaacaaactaagtgaacgaaaggtatacgaatgtatcaaacagtttggtattagaatcaaggatctccgaacgtatggagtcaattatacgtttttatataatttttggacaaatgtaaagtccatatctcctcttccgtcaccaaaaaagttaatagcattaactatcaaacaaactgctgaagtggtaggtcatactccatcaatttcaaaaagagcttatatggcaacgactattttagaaatggtaaaggataaaaattttttagatgtagtatctaaaactacgttcgatgaattcctatctatagtcgtagatcacgttaaatcatctacggatggatgatatagatctttacacaaataattacaagaccgataaatggaaatggataagcgtatgaaatctctcgcaatgacagctttcttcggagagctaagcacattagatattatggcattgataatgtctatatttaaacgccatccaaacaataccattttttcagtggataaggatggtcagtttatgattgatttcgaatacgataattataaggcttctcaatatttggatctgaccctcactccgatatctggagatgaatgcaagactcacgcatcgagtatagccgaacaattggcgtgtgcggatattattaaagaggatattagcgaatatatcaaaactactccccgtcttaaacgatttataaaaaaataccgcaatagatcagatactcgtatcagtcgagatacagaaaagcttaaaatagctctagctaaaggcatagattacgaatatataaaagacgcttgttaataagtaaatgaaaaaaaactagtcgtttataataaaacacgatatggatgccaacgtagtatcattttctactattgcgacgtatatagacgctttagcgaagaatgcttcggaattagaacagaggtctaccgcatacgaaataaataatgaattggaactagtatttattaagccgccattgattactttgacaaatgtagtgaatatctctacgattcaggaatcgtttattcgatttaccgttactaataaggaaggtgttaaaattagaactaagattccattatctaaggtacatggtctagatgtaaaaaatgtacagttagtagatgctatagataacatagtttgggaaaagaaatcattagtgacggaaaatcgtcttcacaaagaatgcttgttgagactatcgacagaggaacgtcatatatttttggattacaagaaatatggatcctctatccgactagaattagtcaatcttattcaagcaaaaacaaaaaactttacgatagactttaagctaaaatattttctaggatccggtgcccagtctaaaagttctttgttgcacgctattaatcatccaaagtcaaggcctaatacatctctggaaatagaattcacacctagagacaatgaaacagttccatatgatgaactaataaaggaattgacgactctctcgcgtcatatatttatggcttctccagagaatgtaattctttctccgcctattaacgcgcctataaaaacctttatgttgcctaaacaagatatagtaggtttggatctggaaaatctatatgccgtaactaagactgacggcattcctataactatcagagttacatcaaacgggttgtattgttattttacacatcttggttatattattagatatcctgttaagagaataatagattccgaagtagtagtctttggtgaggcagttaaggataagaactggaccgtatatctcattaagctaatagagcctgtgaatgcaatcaatgatagactagaagaaagtaagtatgttgaatctaaactagtggatatttgtgatcggatagtattcaagtcaaagaaatacgaaggtccgtttactacaactagtgaagtcgtcgatatgttatctacatatttaccaaagcaaccagaaggtgttattctgttctattcaaagggacctaaatctaacattgattttaaaattaaaaaggaaaatactatagaccaaactgcaaatgtagtatttaggtacatgtccagtgaaccaattatctttggagaatcgtctatctttgtagagtataagaaatttagcaacgataaaggctttcctaaagaatatggttctggtaagattgtgttatataacggcgttaattatctaaataatatctattgtttggaatatattaatacacataatgaagtgggtattaagtccgtggttgtacctattaagtttatagcagaattcttagttaatggagaaatacttaaacctagaattgataaaaccatgaaatatattaactcagaagattattatggaaatcaacataatatcatagtcgaacatttaagagatcaaagcatcaaaataggagatatctttaacgaggataaactatcggatgtgggacatcaatacgccaataatgataaatttagattaaatccagaagttagttattttacgaataaacgaactagaggaccgttgggaattttatcaaactacgtcaagactcttcttatttctatgtattgttccaaaacatttttagacgattccaacaaacgaaaggtattggcgattgattttggaaacggtgctgacctggaaaaatacttttatggagagattgcgttattggtagcgacggatccggatgctgatgctatagctagaggaaatgaaagatacaacaaattaaactctggaattaaaaccaagtactacaaatttgactacattcaggaaactattcgatccgatacatttgtctctagtgtcagagaagtattctattttggaaagtttaatatcatcgactggcagtttgctatccattattcttttcatccgagacattatgctaccgtcatgaataacttatccgaactaactgcttctggaggcaaggtattaatcactaccatggacggagacaaattatcaaaattaacagataaaaagacttttataattcataagaatttacctagtagcgaaaactatatgtctgtagaaaaaatagctgatgatagaatagtggtatataatccatcaacaatgtctactccaatgactgaatacattatcaaaaagaacgatatagtcagagtgtttaacgaatacggatttgttcttgtagataacgttgatttcgctacaattatagaacgaagtaaaaagtttattaatggcgcatctacaatggaagatagaccgtctacaaaaaactttttcgaactaaatagaggagccattaaatgtgaaggtttagatgtcgaagacttacttagttactatgttgtttatgtcttttctaagcggtaaataataatatggtatgggttctgatctcccagttctaaatgcattaaataattccaatagagcgatttttgttcctataggaccttccaactgtggatactctgtattgttaatagatatattaatacttttgtcgggtaacagaggttctacgtcttctaaaaataaaagttttataacatctggcctgttcataaataaaaacttggcgattctatatatactcttattatcaaatctagccattgtcttatagatgtgagctactgtaggtgtaccatttgattttctttctaatactatatatttctctcgaagaagttcttgcacatcatctgggaataaaatactactgttgagtaaatcagttattttttttatatcgatattgatggacatttttatagttaaggataataagtatcccaaagtcgataacgacgataacgaagtatttatacttttaggaaatcacaatgactttatcagattaaaattaacaaaattaaaggagcatgtatttttttctgaatatattgtgactccagatacatatggatctttatgcgtcgaattaaatgggtctagttttcagcacggcggtagatatatagaggtggaggaatttatagatgctggaagacaagttagatggtgttctacatccaatcatatatctaaagatatacccgaagatatgcacactgataaatttgtcatttatgatatttatacgtttgattcgttcaagaataaacgattggtattcgtacaggtacctccgtcgttaggagatgatagtcatttgactaatccgttattgtcaccgtattatcgtaattcagtagccagacaaatggtcaatgatatgatttttaatcaagattcatttttaaaatatttattagaacatctgattagaagccactatagagtttctaaacatataacaatagttagatacaaggataccgaagaattaaatctaacgagaatatgttataatagagataagtttaaggcgtttgtattcgcttggtttaacggcgtttcggaaaatgaaaaggtactagatacgtataaaaaggtatctaatttgatataatgaattcagtgactgtatcacacgcgccatatactattacttatcacgatgattgggaaccagtaatgagtcaattggtagagttttataacgaagtagccagttggctgctacgagacgagacgtcgcctattcctgataagttctttatacagttgaaacaaccgcttagaaataaacgagtatgtgtgtgtggtatagatccgtatccgaaagatggaactggtgtaccgttcgaatcaccaaattttacaaaaaaatcaattaaggagatagcttcatctatatctagattaaccggagtaattgattataaaggttataaccttaatataatagacggggttataccctggaattattacttaagttgtaaattaggagaaacaaaaagtcacgcgatttactgggataagatttccaagttactgctgcagcatataactaaacacgttagtgttctttattgtttgggtaaaacagatttctcgaatatacgggccaagttagaatccccggtaactaccatagtcggatatcatccagcggctagagaccgccaattcgagaaagatagatcatttgaaattatcaacgttttactggaattagacaacaaggcacctataaattgggctcaagggtttatttattaatgctttagtgaaattttaacttgtgttctaaatggatgcggctattagaggtaatgatgttatctttgttcttaagactataggtgtcccgtcagcgtgcagacaaaatgaagatccaagatttgtagaagcatttaaatgcgacgagttagaaagatatattgagaataatccagaatgtacactattcgaaagtcttagggatgaggaagcatactctatagtcagaattttcatggatgtagatttagacgcgtgtctagacgaaatagattatttaacggccattcaagattttattatcgaggtgtcaaactgtgtagctagattcgcgtttacagaatgcggcgccattcatgaaaatgtaataaaatccatgagatctaatttttcattgactaagtctacaaatagagataaaacaagttttcatattatctttttagatacgtataccactatggatacattgatagctatgaaacgaacactattagaattaagtagatcatctgaaaatccactaaccagatcgatagacactgccgtatataggagaaaaacaactcttcgggttgtaggtactaggaaaaatccaaattgcgacactattcatgtaatgcaaccaccgcatgataatatagaagattacctattcacttacgtggatatgaacaacaatagttattacttttctctacaacaacgattggaggatttagttcctgataagttatgggaaccagggtttatttcattcgaagacgctataaaaagagtttcaaaaatattcattaattctataataaactttaatgatctcgatgaaaataattttacaacggtaccactggtcatagattacgtaacaccttgtgcattatgtaaaaaacgatcgcataaacatccgcatcaactatcgttggaaaatggtgctattagaatttacaaaactggtaatccacatagttgtaaagttaaaattgttccgttggatggtaataaactgtttaatattgcacaaagaattttagacactaactctgttttattaaccgaacgaggagaccatatagtttggattaataattcatggaaatttaacagcgaagaacccttgataacaaaactaattttgtcaataagacatcaactacctaaggaatattcaagcgaattactctgtccaagaaaacgaaagactgtagaagctaacatacgagacatgttagtagattcagtggagaccgatacctatccggataaacttccgtttaaaaatggtgtattggacctggtagacggaatgttttactctggagatgatgctaaaaaatatacgtgtactgtatcaaccggatttaaatttgacgatacaaagttcgtcgaagacagtccagaaatggaagagttaatgaatatcattaacgatatccaaccattaacggatgaaaataagaaaaatagagagctatatgaaaaaacattatctagttgtttatgcggtgctaccaaaggatgtttaacattcttttttggagaaactgcaactggaaagtcgacaaccaaacgtttgttaaagtctgctatcggtgacctgtttgttgagacgggtcaaacaattttaacagatgtattggataaaggacctaatccatttatcgctaacatgcatttgaaaagatctgtattctgtagcgaactacctgattttgcctgtagtggatcaaagaaaattagatctgacaatattaaaaagttgacagaaccttgtgtcattggaagaccgtgtttctccaataaaattaataatagaaaccatgcgacaatcattatcgatactaattacaaacctgtttttgataggatagataacgcattaatgagaagaattgccgtcgtgcgattcagaacacacttttctcaaccttctggtagagaggctgctgaaaataatgacgcgtacgataaagtcaaactattagacgaggggttagatggtaaaatacaaaataatatatatagatttgcatttctatacttgttggtgaaatggtacaaaaaatatcatgttcctattatgaaactatatcctacacccgaagagattcctgactttgcattctatctcaaaataggtactctgttggtatctagctctgtaaagcatattccattaatgacggacctctccaaaaagggatatatattgtacgataatgtggtcactcttccgttgactactttccaacagaaaatatccaagtattttaattctagactatttggacacgatatagagagcttcatcaatagacataagaaatttgccaatgttagtgatgaatatctgcaatatatattcatagaggatatttcatctccgtaaatatatgctcatatatttatagaagatatcacatatctaaatgaataccggaatcatagatttatttgataatcatgttgatagtataccaactatattacctcatcagttagctactctagattatctagttagaactatcatagatgagaacagaagcgtgttattgttccatattatgggatcaggtaaaacaataatcgctttgttgttcgccttggtagcttccagatttaaaaaggtttacattctagtgccgaacatcaacatcttaaaaattttcaattataatatgggtgtagctatgaacttgtttaatgacgaattcatagctgagaatatctttattcattccacaacaagtttttattctcttaattataacgataacgtcattaattataacggattatctcgctacaataactctatttttatcgttgatgaggcacataatatctttgggaataatactggagaacttatgaccgtgataaaaaataaaaacaagattccttttttactattgtctggatctcccattactaacacacctaatactctgggtcatattatagatttaatgtccgaagagacgatagattttggtgaaattattagtcgtggtaagaaagtaattcagacacttcttaacgaacgcggtgtgaatgtacttaaggatttgcttaaaggaagaatatcatattacgaaatgcctgataaagatctaccaacgataagatatcacggacgtaagtttctagatactagagtagtatattgtcacatgtctaaacttcaagagagagattatatgattactagacgacagctatgttatcatgaaatgtttgataaaaatatgtataacgtgtcaatggcagtattgggacaacttaatctgatgaataatttagatactttatttcaggaacaggataaggaattgtacccaaatctgaaaataaataatggcgtgttatacggagaagaattggtaacgttaaacattagttccaaatttaaatactttattaatcggatacagacactcaacggaaaacattttatatacttttctaattctacatatggcggattggtaattaaatatatcatgctcagtaatggatattctgaatataatggttctcagggaactaatccacatatgataaacggcaaaccaaaaacatttgctatcgttactagtaaaatgaaatcgtctttagaggatctattagatgtgtataattctcctgaaaacgatgatggtagtcaattgatgtttttgttttcatcaaacattatgtccgaatcctatactctaaaagaggtaaggcatatttggtttatgactatcccagatactttttctcaatacaaccaaattcttggacgatctattagaaaattctcttacgccgatatttctgaaccagttaatgtatatcttttagccgccgtatattccgatttcaatgacgaagtgacgtcattaaacgattacacacaggatgaattaattaatgttttaccatttgacatcaaaaagctgttgtatctaaaatttaagacgaaagaaacgaatagaatatactctattcttcaagagatgtctgaaacgtattctcttccaccacatccatcaattgtaaaagttttattgggagaattggtcagacaatttttttataataattctcgtattaagtataacgataccaagttacttaaaatggttacatcagttataaaaaataaagaagacgctaggaattacatagatgatattgtaaacggtcacttctttgtatcgaataaagtatttgataaatctcttttatacaaatacgaaaacgatattattacagtaccgtttagactttcctacgaaccatttgtttggggagttaactttcgtaaagaatataacgtggtatcttctccataaaactgatgagatatataaagaaataaatgtcgagctttgttaccaatggatacctttccgttacattggaaccacacgagctgacgttagacataaaaactaatattaggaatgccgtatataagacgtatctccatagagaaattagtggtaaaatggccaagaaaatagaaattcgtgaagacgtggaattacctctcggcgaaatagttaataattctgtagttataaacgttccgtgtgtaataacctacgcgtattatcacgttggggatatagtcagaggaacattaaacatcgaagatgaatcaaatgtaactattcaatgtggagatttaatctgtaaactaagtagagattcgggtactgtatcatttagcgattcaaagtactgcttttttcgaaatggtaatgcgtatgacaatggcagcgaagtcactgccgttctaatggaggctcaacaaggtatcgaatctagttttgtttttctcgcgaatatcgtcgactcataaaaaagagaatagcggtaagtataaacacgaatactatggcaataattgcgaatgttttattctcttcgatatatttttgataatatgaaaaacatgtctctctcaaatcggacaaccatctcataaaatagttctcgcgcgctggagaggtagttgccgctcgtataatctctccagaataatatacttgcgtgtcgtcgttcaatttatacggatttctatagttctctgttatataatgcggtttgccctcatgattagacgacgacaatagtgttctaaatttagatagttgatcagaatgaatgtttattggcgttggaaaaattatccatacagcgtctgcagagtggttgatagttgttcctagatatgtaaaataatccaacttactaggcagcaaattgtctagataaaatactgaatcaaacggtgcagacgtattggcggatctaatggaatccaattgattaactatcttttgaaaatatacatttttatgatccaatacttgtaagaatatagaaataatgataagtccatcatcgtgtttttttgcctcttcataagaactatattttttcttattccaatgaacaagattaatctctccagagtatttgtacacatctatcaagtgattggatccataatcgtcttcctttccccaatatatatgtagtgatgataacacatattcattggggagaaaccctccacttatatatcctcctttaaaattaatccttactagttttccagtgttctggatagtggttggtttcgactcattataatgtatgtctaacggcttcaatcgcgcgttagaaattgcttttttagtttctatattaataggagatagttgttgcggcatagtaaaaatgaaatgataactgtttaaaaatagctcttagtatgggaattacaatggatgaggaagtgatatttgaaactcctagagaattaatatctattaaacgaataaaagatattccaagatcaaaagacacgcatgtgtttgctgcgtgtataacaagtgacggatatccgttaataggagctagaagaacttcattcgcgttccaggcgatattatctcaacaaaattcagattctatctttagagtatccactaaactattacggtttatgtactacaatgaactaagagaaatctttagacggttgagaaaaggttctatcaacaatatcgatcctcactttgaagagttaatattattgggtggtaaactagataaaaaggaatctattaaagattgtttaagaagagaattaaaagaggaaagtgatgaacgtataacagtaaaagaatttggaaatgtaattctaaaacttacaacacgggataaattatttaataaagtatatataagttattgcatggcgtgttttattaatcaatcgttggaggatttatcgcatactagtatttacaatgtagaaattagaaagattaaatcattaaatgattgtattaacgacgataaatacgaatatctgtcttatatttataatatgctagttaatagtaaatgaacttttacagatctagtataattagtcagattattaagtataatagacgactagctaagtctattatttgcgaggatgactctcaaattattacactcacggcattcgttaaccaatgcctatggtgtcataaacgagtatccgtgtccgctattttattaactactgataacaaaatattagtatgtaacagacgagatagttttctctattctgaaataattagaactagaaacatgtttagaaagaaacgattatttctgaattattccaattatttgaacaaacaggaaagaagtatactatcgtcatttttttctctagatccagctactactgataatgatagaatagacgctatttatccgggtggcatacccaaaaggggtgagaatgttccagagtgtttatccagggaaattaaagaagaagttaatatagacaattcttttgtattcatagacactcggttttttattcatggcatcatagaagataccattattaataaattttttgaggtaatcttctttgtcggaagaatatctctaacgagtgatcaaatcattgatacatttaaaagtaatcatgaaatcaaggatctaatatttttagatccgaattcaggtaatggactccaatacgaaattgcaaaatatgctctagatactgcaaaacttaaatgttacggccatagaggatgttattatgaatcattaaaaaaattaactgaggatgattgattaaaaaatataaattaatttaccatcgtgtatttttataacgggattgtccggcatatcatgtagatagttaccgtctacatcgtatactcgaccatctacgcctttaaatcctctatttattgacattaatctattagaattggaataccaaatattagtaccctcaattagtttattggtaatattttttttagacgatagatcgatggctcttgaaaccaaggttttccaaccggactcattgtcgatcggtgagaagtctttttcattagcatgaatccattctaatgatgtatgtttaaacactctaaacaattggacaaattcttttgatttgctttgaatgatttcaaataggtcttcgtctacagtaggcataccattagataatctagccattataaagtgcacgtttacatatctacgttctggaggagtaagaacgtgactattgagacgaatggctcttcctactatctgacgaagagacgcctcgttccatgtcatatctaaaatgaagatatcattaattgagaaaaaactaataccctcgcctccactagaagagaatacgcatgttttaatgcattctccgttagtgtttgattcttggttaaactcagccaccgccttgattctagtatcttttgttctagatgagaactctatattagagataccaaagactttgaaatatagtaataagatttctattcctgactgattaacaaatggttcaaagactagacatttaccatgggatgctaatattcccaaacatacatctataaatttgacgcttttctcttttaattcagtaaatagagagatatcagccgcactagcatcccctttcaatagttctccctttttaaaggtatctaatgcggatttagaaaactctctatctcttaatgaatttttaaaatcattatatagtgttgctatctcttgcgcgtattcgcccggatcacgattttgtctttcaggaaagctatcgaacgtaaacgtagtagccatacgtctcagaattctaaatgatgatatacctgtttttatttcagcgagtttagccttttgataaatttcttcttgctttttcgacatattaacgtatcgcattaatactgttttcttagcgaatgatgcagacccttctacgtcatcaaaaatagaaaactcgttattaactatatacgaacatagtcctcctagtttggagactaattctttttcatcgactagacgtttattctcaaatagcgattggtgttgtaaggatcctggtcgtagtaagttaaccaacatggtgaattcttgcacactattgacgataggtgtagccgataaacaaatcatcttatggttttttaacgcaatggtcttagataaaaaattatatactgaacgagtaggacggatcttaccatcttctttgattaatgatttagaaatgaagttatgacattcatcaataatgacgcatattctactcttggaattaatagttttgatattagtaaaaaatttatttctaaaattttgatcatcgtaattaataaaaatacaatccttcgttatctctggagcgtatctgagtatagtgttcatccaaggatcttctatcaaagcctttttcaccaataagataatagcccaattcgtataaatatccttaagatgtttgagaatatatacagtagtcattgttttaccgacacccgtttcatggaacaataaaagagaatgcatactgtctaatcctaagaaaactcttgctacaaaatgttgataatccttgaggcgtactacgtccgaccccatcatttcaacgggcatattagtagttctgcgtaaggcataatcgatataggccgcgtgtgatttactcatttatgagtgataagtaataactatgttttaaaaatcacagcagtagtttaactagtcttctctgatgtttgttttcgatactttttgaatcagaagtcatactagaataaagcaacgagtgaacgtaatagagagcttcgtatactctattcgaaaactctaagaacttattaatgaattccgtatccactggattgtttaaaatactaaattgaacactgttcacatccttccaagaagaagacttagtgacggacttaacatgagacataaataaatccaaattttttttacaaacatcactagccaccataatggcgctatctttcaaccagctatcgcttacgcattttagcagtctaacatttttaaagagactacaatatattctcatagtatcgattacacctctaccgaataaagttggaagtttaataatacaatatttttcgtttacaaaatcaaataatggtcgaaacacgtcgaaggttaacatcttataatcgctaatgtatagattgttttcagtgagatgattattagatttaatagcatctcgttcacgtttgaacagtttattgcgtgcgctgaggtcggcaactacggcgtccgctttagtactcctcccataatactttacgctattaatctttaaaatttcatagactttatctagatcgctttctggtaacatgatatcatgtgtaaaaagttttaacatgtcggtcggcattctatttagatcattaactctagaaatctgaagaaagtaattagctccgtattccagactaggtaatgggcttttacctagagacagattaagttctggcaatgtttcataaaatggaagaaggacatgcgttccctcccggatattttttacaatttcatccatttacaactctatagtttgttttcattattattagttattatctcccataatcttggtaatacttaccccttgatcgtaagataccttatacaggtcattacatacaactaccaattgtttttgtacataatagattggatggttgacatccatggtggaataaactactcgaacagatagtttatctttccccctagatacattagccgtaatagttgtcggcctaaagaatatctttggtgtaaagttaaaagttagggttcttgttccattattgctttttgtcagtagttcattataaattctcgagatgggtccgttctctgaatatagaacatcatttccaaatctaacttctagtctagaaataatatcggtcttattcttaaaatctattcccttgatgaagggatcgttaatgaacaaatccttggcctttgattcggctgatctattatctccgttatagacgttacgttgactagtccaaagacttacaggaatagatgtatcgatgatgttgatactatgtgatatgtgagcaaagattgttctcttagtggcatcactatatgttccagtaatggcggaaaactttttagaaatgttatatataaaagaattttttcgtgttccaaacattagcagattagtatgaagataaacactcatattatcaggaacattatcaatttttacatacacatcagcatcttgaatagaaacgataccatcttctggaacctctacgatctcggcagactccggataaccagtcggtgggccatcgctaacaataactagatcatccaacaatctactcacatatgcatctatataatctttttcatcttgtgagtaccctggatacgaaataaatttattatccgtatttccataataaggtttagtataaacagagagagatgttgccgcatgaacttcagttacagtcgccgttggttggtttatttgacctattactctcctaggtttctctataaacgatggtttaatttgtacattcttaaccatatatccaataaagctcaattcaggaacataaacaaattctttgttgaacgtttcaaagtcgaacgaagagtcacgaataacgatatcggatactggattgaaggttaccgttacggtaatttttgaatcggatagtttaagactgctgaatgtatcttccacatcaaacggagttttaatataaacgtatactgtagatggttctttaatagtgtcattaggagttaggccaatagaaatatcattaagttcactagaatatccagagtgtttcaaagcaattgtattattgatacaattattatataattcttcgccctcaatttcccaaataacaccgttacacgaagagatagatacgtgattaatacatttatatccaacatatggtacgtaactgaatcttcccatacctttaacttctggaagttccaaactcagaaccaaatgattaagcgcagtaatatactgatccctaatttcgaagctagcgatagcctgattgtctggaccatcgtttgtcataactccggatagagaaatatattgcggcatatacaaagttggaatttgactatcgactgcgaagacattagaccgtttaatagagtcatccccaccgatcaaagaattaatgatagtattattcattttctatttaaaatggaaaaagcttacaataaactccgtagagaaatatctataatttgtgagttttccttaaagtaacagcttccgtaaacgccgtctttatctcttagtaggtttattgtatttatgaccttttccttatcttcatagaatactaaaggcaacaaagaaatttttggttcttctctaagagctacgtgagacttaaccatagaagccaacgaatccctacatattttagaacagaaataccctacttcaccacccttgtatgtctcaatactaataggtctaaaaaccaaatcttgattacaaaaccaacacttatcaattacactatttgtcttaatagacacatctgccatagatttataatactttggtagtatacaagcgagtgcttcttctttagcgggcttaaagactgctttaggtgctgaaataaccacatctggaaggcttactcgcttagccatttaattacggaactatttttttatacttctaatgagcaagtagaaaacctctcatctacaaaaacgtactcgtgtccataatcctctaccatagttacacgttttttagatctcatatgtgctaaaaagttttcccatactaattggttactattatttttcgtataatttttaacagtttgaggttttagatttttagttacagaagtgatatcgaatattttatccaaaaagaatgaataattaattgtcttagaaggagtgttttcttggcaaaagaataccaagtgcttaaatatttctactacttcattaatcttttctgtactcagattcagtttctcatcttttacttgattgattatttcaaagactaacttataatcctttttatttattctctcgttagccttaagaaaactagatacaaaatttgcatctacatcatccgtggatatttgatttttttccatgatatccaagagttccgagataatttctccagaacattgatgagacaataatctccgcaatacatttctcaaatgaataagtttattagacacgtggaagtttgactttttttgtacctttgtacatttttgaaataccgactcgcaaaaaatacaatattcatatccttgttcagatactataccgttatgtctacaaccgctacataatcgtagattcatgttaacactctacgtatctcgtcgtccaatattttatataaaaacattttatttctagacgttgccagaaaatcctgtaatatttttagttttttgggctgtgaataaagtatcgccctaatattgttaccgtcttccgccaatatagtagttaaattatccgcacatgcagaagaacaccgcttaggcggattcagtacaatgttatatttttcgtaccaactcatttaaatatcataatctaaaatagttctgtaatatgtctagcgctaatatattgatcataatcctgtgcataaattaagatacaacaatgtctcgaaatcatcgacatggcttcttccatagttagaagatcgtcgtcaaagttagcaacgtgattcatcaacatttgctgttttgaggcagcaaatactgaaccgtcgccattcaaccattcataaaaaccatcgtctgaatccattgataatttcttgtactggtttttgagagctcgcatcaatctagcatttctagctcccggattgaaaacagaaagaggatcgtacatccagggtccattttctgtaaatagaatcgtataatgtcccttcaagaagatatcagacgatccacaatcaaagaattggtctccgagtttgtaacaaactgcggactttaacctatacatgataccgtttagcataatttctggtgatacgtcaatcggagtatcatctattagagatctaaagccggtgtaacattctccaccaaacatattcttattctgacgtcgttctacataaaacatcattgctccattaacgataacaggggaatgaacagcactacccatcacattagttcccaatggatcaatgtgtgtaactccagaacatcttccatagcctatgttaggaggagcgaacaccactcttccactattgccatcgaatgccatagaataaatatccttggaattgatagaaatcggactgtcggatgttgtgatcatcttcataggattaacaactatgtatggtgccgcctgaagtttcatatcgtaactgatgccgtttataggtctagccacagaaaccaacgtaggtctaaatccaactatagacaaaatagaagccaatatctgttcctcatctgtcataacttgagagcatccagtatgaataatcttcattagatggggatctaccgcatcatcatcgttacaataaaaaattcccattctaatgttcataattgcttttctaatcatggtatgcatgtttgctctctgaatctctgtggaaattagatctgatacacctgtaatcactatcggattatcctccgtaagacgattaaccaacaacatataattataagactttacttttctaaattcataaagttgctggattaggctataggtgtctccatgtacatacgcgttctcgagcgcaggaagtttaataccgaatagtgccatcagaataggatgaatatagtaattagtttctggttttctataaataaaagacaaatcttgtgaactagacatatcggtaaaatgcatggattggaatcgtgtagtcgacagaagaatatgatgattagatggagagtatattttatctaactctttgagttggtcaccgattctaggactagctcgagaatgaataagtactaaaggatgagtacatttcacagaaacactagcattgttcaatgtgctctttacatgggtaaggagttgaaatagctcgtttctatttgttctgacaatatttagtttattcataatgttaagcatatcctgaatagtaaagttagatgtgtcatacttgttagtagttagatatttagcaattgcattcccatcatttctcaatctcgtactccaatcatgcgtggatgctacttcgtcgatggaaaccatacaatcctttttgataggctgttgagattgatcatttcctgcacgtttaggtttggtacgttgatttctagcccctgcggatataaagtcatcgtctacaatttgggacaatgaattgcatacactacaagacaaagatttatcagaagtgtgaatatgatcttcatctaccaaagaaagagtttgattagtataactagattttagtcctgcgttagatgttaaaaaaacatcgctattgaccacggcttccattatttatattcgtagtttttactcgaaagcgtgattttaatatccaatcttattacttttggaatcgttcaaaacctttgactagttgtagaatttgatctattgccctacgcgtatactcccttgcatcatatacgttcgtcaccagatcgtttgtttcggcctgaagttggtgcatatctctttcaacattcgacatgagatccttaagggccatatcgtctagattttgttgagatgctgctcctggatttggattttgttgtgctgttgtacatactgtaccaccagtaggtgtaggagtacatacagtggccacaataggaggttgagaaagtgtaaccgttggagtagtacaagaaatacttccatccgattgttgtgtacatgtagttgttggtaacgtctgagaaggttgggtagatggcggcgtcgtcgttttttgatctttattaaatttagagataatatcctgaacagcattgctcggcgtcaacgctggaaggagtgaactcgccggcgcatcagtatcttcagacagccaatcaaaaagattagacatatcagatgatgtattagtttgttgtcgtggttttggtgtaggagcagtactactaggtagaagaataggagccgatgtagctgttggaaccggctgtggagttatatgaatagttggttgtagcggttggataggctgtctgctggcggccatcatattatctctagctagttgttctcgcaactgtctttgataatacgactcttgagactttagtcctatttcaatcgcttcatcctttttcgtatccggatccttttcttcagaataatagattgacgactttggtgtagaggattctgccagcctctgtgagaacttgttaaagaagtccatttaaggctttaaaattgaattgcgattataagattaaatggcagacacagacgatattatcgactatgaatccgatgatctcaccgaatacgaggatgatgaagaagaggaagaagatggagagtcactagaaactagtgatatagatcccaaatcttcttataagattgtagaatcagcatccactcatatagaagatgcgcattccaatcttaaacatatagggaatcatatatctgctcttaaacgacgctatactagacgtataagtctatttgaaatagcgggtataatagcagaaagctataacttgcttcaacgaggaagattacctctagtttcagaattttctgacgaaacgatgaagcaaaatatgctacatgtaattatacaagagatagaggagggttcttgtcctatagtcatcgaaaagaacggagaattgttgtcggtaaacgattttgacaaagatggtctaaaattccatctagactatattatcaaaatttggaaacttcaaaaacgatattagaatttatacgaatatcgttctctaaatgtcacaatcaagtctcgcatgttcagcaatttattgtcgtactttatatcgtgttcattaacgatatcttgcaaaatagtaatgattctatcttccttcgatagatattcttcagagattattgtcttatattctttcttgttatcagatatgaatttgataagactttgaacattattgatacccgtctgtttaattttttctacagatattttagttttggcagattctatcgtatctgtcaatagacatccaacatcgacattcgacgtcaattgtctataaatcaacgtataaattttagaaataacattagcgaattgttgtgcgttgatgtcgttattctgaaacagtatgattttaggtagcattttcttaacaaagagaacgtatttattgttactcagttgaacagatgatatatccagattactaacgcatctgattccgtataccaaactttcagaagaaatggtatacaattgtttgtattcattcaatgtctctttttcagaaattagtttagagtcgaatactgcaataattttcaagagatagttttcatcagataagattttatttagtgtagatatgataaaactattgttttgttggagaacttgatacgccgcgttctctgtagtcgacgctctcaaatgggaaacaatctccattatttttttggaatcggatactatatcttcggtatcttgacgcagtctagtatacatagagttaagagagattagagtttgtacattaagcaacatgtctctaaatgtggctacaaacttttcctttttcacatcatctagtttattatataccgatttcacaacggcaccagatttaaggaaccagaatgaaaaactctgataactacaatatttcatcatagttacgattttatcatcttctatagttggtgtaatagcgcatacctttttctccaagactggaaccaacgtcataaaaatgtttaaatcaaaatccatatcaacatctgatgcgctaagaccagtctcgcgttcaagattatctttactaatggtgacgaactcatcgtataaaactctaagtttgtccattatttatttacagatttagttgtttaatttatttgtgctcttccagagttgggatagtatttttctaacgtcggtattatattattaggatctacgttcatatgtatcataatattaatcatccacgttttgataaatctatctttagcttctgaaataacgtatttaaacaaaggagaaaaatatttagctacggcatcagacgcaataacattttttgtaaatgtaacgtatttagacgacagatcttcgttaaaaagttttccatctatgtagaatccatcggttgttaacaccattcccgcgtcagattgaataggagtttgaatagtttgttttggaaatagatccttcaataacttatagttgggtgggaaaaaatcgattttatcactagactctttcttttttactatcattacctcatgaactatttcttgaatgagtatatgtattttctttcctatatcggacgcgttcattggaaaatataccatgtcgttaactataagaatatttttatcctcgtttacaaactgaataatatcagatgtagttcgtaaacgaactatatcatcaccagcacaacatctaactatatgatatccactagtttcctttagccgtttattatcttgttccatattagcagtcattccatcatttaagaaggcgtcaaaaataatagggagaaatgacattttggattctgttacaactttaccaaaattaaggatatacggacttactatctttttctcaacgtcaatttgatgaacacacgatgaaaatgtgcttctatgagattgatcatgtagaaaacaacaagggatacaatatttccgcatatcatgaaatatattaagaaatcccaccttattatatttccccaaaggatccatgcacgtaaacattatgccgttatcattaataaagacttctttctcatcggatctgtaaaagttgttactgatttttttcattccaggatctagataattaataatgatgggttttctattcttattctttgtattttggcatatcctagaccagtaaacagtttccactttggtaaaatcagcagacttttgaacgctattaaacatggcattaatggcaataactaaaaatgtaaaatatttttctatgttaggaatatggtttttcactttaatagatatatggtttttggccaaaatgatagatatttttttatccgaggatagtaaaatattattagtcgccgtctctataaaaatgaagctagtctcgatatccaattttattctagaattgataggagtcgccaaatgtaccttatacgttatatctcccttgatgcgttccatttgtgtatctatatcggacacaagatctgtaaatagttttacgttattaatcatcacggtatcgccgtcgctagataacgctaatgtaccatccaagtcccaaatggagagatttaactgttcatcgtttagaataaaatgattaccggtcatattaataaagtgttcatcgtatctagataacaacgacttataattaatgtccaagtcttgaactcgctgaatgatcttttttaacccagttagttttagattggtacgaaatatattgttaaactttgattctacagtaatgtccaaatctagttgtggaaatacttccatcaacattgtttcaaacttgataatattattatctacatcttcgtacgatccaaattccggaatagatgtatcgcacgctctggccacccagataaccaaaaagtcacacgctccaggatatacattgtataaaaagctatcgttttttagtagggtttttttctgcgtgtatacgaagggattaaaaatagtattatcaacgtaactatattccaaattattcttatgagaatagataataatatcgtccttaatatctaacaaatttcctaaatatccctttaattgagtcattcgaagcgtcaatagaatatgtctcttaactatttccggctgttgtatatttaaatgacttcgtaaaaaataatatatgggcgacttctcatctatgtaatcatatggagtgagatatagggctcgttctacctcctgccccttacccacctgtaataccaattgcggacttactatatatcgcatatttatatcgtggggtaaagtgaaaatctactaccgatgatgtaagtcttacaatgttcgaaccagtaccagatcttaatttggaggcctccgtagaactaggggaggtaaatatagatcaaacaacacctatgataaaggagaatagcggttttatatcccgcagtagacgtctattcgcccatagatctaaggatgatgagagaaaactagcactacgattctttttacaaagactttattttttagatcatagagagattcattatttgttcagatgcgttgacgctgtaaaagacgtcactattaccaaaaaaaataacattatcgtggcgccttatatagcacttttaactatcgcatcaaaaggatgcaaacttacagaaacaatgattgaagcattctttccagaactatataatgaacatagtaagaaatttaaattcaactctcaagtatccatcatccaagaaaaactcggataccagtttggaaactatcacgtttatgattttgaaccgtattactctacagtagctctggctattcgagatgaacattcatctggcatttttaatatccgtcaagagagttatctggtaagttcattatctgaaataacatatagattttatctaattaatctaaaatctgatcttgttcaatggagtgctagtacgggcgctgtaattaatcaaatggtaaatactgtattgattacagtgtatgaaaagttacaactggtcatagaaaatgattcacaatttacatgttcattggctgtggaatcaaaacttccaataaaattacttaaagatagaaatgaattatttacaaaattcattaacgagttaaaaaagaccagttcattcaagataagcaaacgcgataaggatacgctactaaaatattttacttaggactggagttagaatttatagacgactcatttcgtttatcattgttactattattactattactatcattattagtgttggcattattagtattcttcttgtcatcttgttcagaaatatacagcaatgctatacctaatactaaatacattatcatgctcgcaatggctctaacaacaacgaaccaaaatgaatttggtcgtagcttttgttcacaaaaatacataaagaaatgtctacataaatctatggcgccattggctacttgaaatagcgccagtcctcctacagattttaatatagctgtataacatgacatttattcatcatcaaaagagacagagtcaccatctgtcatatttagattttttttcatgtgttcaaagtatcctctactcatttcattataatagtttatcatacttagaattttaggacggatcaatgagtaagacttgactagatcgtcagtagtaatttgtgcatcgtctattctgcatccgcttcgtcgaataatgtatagcatcgctttgagattctccatagctatcaagtctttatacaatgacatggaaatatctgtgaatactttatacttctccaacatcgatgccttaacatcatcgcctactttagcattgaaaatacgttctattgtgtagatggatgtagcaagatttttaaacaacaatgccatcttacacgatgattgcctcaagtctccaatcgtttgtttagaacgattagctacagagtccaatgcttggctgactagcatattattatctttagaaattgtattcttcaatgaggcgtttatcatatctgtgatttcgttagtcatattacagtctgactgggttgtaatgttatccaacatatcacctatggatacggtacacgtaccagcatttgtaataatcctatctaagatgttgtatggcattgcgcagaaaatatcttctcctgtaatatctccactctcgataaatctactcagattattcttaaatgccttattctctggagaaaagatatcagtgtccatcatttcattaatagtatacgcagaaaagataccacgagtatcaattctatccaagatacttatcggttccgagtcacagataatggtttcctctccttcgggagatcctgcatagaaatatctaggacaatagtttctatactgtctgtaactctgataatctctaaagtcactaactgataccatgaaattgagaagatcaaacgctgaagtaattaatttttctgcctcgtttttactacaactagttttcatcaatgtagtgacgatgtattgtttagttacttttggtctaatactgatgatagagatattattgcttcccataatggatcttctagtagtcaccttaaagcccattgatgcgaatagcagatagataaagtcttggtatgactcctttctaatatagtacggactacctttgtcacccaactttatacccacataagccataacaacctctttaatagccgtttcatgaggtttatcagccatgagcctgagtagttggaagaatctcatgaatcccgtctcagaaagtcctatatgcatgatagatttatctttcctgggaaactctcgtatagtcatagatgaaatactctttaaagtttctgaaataagattagtaacagtcttacctccgactactctaggtaacaaacaaactctaataggtgttttctctgcggagataatatcagaaaggatagagcaataagtagtattattgtgattataaagaccgaatacataacaggtagaatttataaacatcatgtcctgaaggtttttagacttgtattcctcgtaatccataccgtcccaaaacatggatttggtaactttgatagccgtagatctttgttccttcgccaacaggttaaagaaattaataaagaatttgttgtttctatttatgtccacaaattgcacgtttggaagcgccacggttacattcactgcagcattttgaggatcgcgagtatgaagtacgatgttattgtttactggtatatctggaaagaaatctaccagtctaggaataagagattgatatcgcatagaaatagtaaagtttataatctcatcatcgaagagcattttgttaccattgtaataaatatccactctgtcatatgtataaatgaagtactgttcaaacatgatgagatgtttatatgttggcatagtagtgagatcgacgtttggtaatggcaatgtattaagattaactccataatgtctagcagcatctgcgatgttataagcgtcgtcaaagcggggtcgatcttgtattgttatatattgtctaacacctataagattatcaaaatcttgtctgcttaatacaccgttaacaatttttgccttgaattcttttattggtgcattaataacatccttatagaggatgttaaacaaataagtgttatcaaagttaagatctggatatttcttttctgctagaacatccattgagtcggagccatctggtttaatataaccaccgataaatctagctctgtattctgtatccgtcaatctaatattaagaaggtgttgagtgaaaggtggaagatcgtaaaagctgtgagtattaatgataggattagtttccgaactaatgttaattggggtattaataatatctatatttccagcgttaagtgtaacattaaacagttttaattcacgtgacgtggtatcaattaaataattaatgcccaatttggatatagcagcctgaagctcatcttgtttagttacggatcctaatgagttattaagcaatatatcgaacggatgaacgaaggttgttttaagttggtcacatactttgtaatctagacatagatgcggaagaacggtagaaactatacgaaataaatattcagagtcctctaattgatcaagagtaactattgacttaataggcatcatttatttagtattaaatgacgaccgtaccagtgacggatatacaaaacgatttaattacagagttttcagaagataattatccatctaacaaaaattatgaaataactcttcgtcaaatgtctattctaactcacgttaacaacgtggtagatagagaacataatgccgccgtagtgtcatctccagaggaaatatcctcacaacttaatgaagatctatttccagatgatgattcaccggccactattatcgaacgagtacaacctcatactactattattgacgatactccacctcctacgtttcgtagagagttattaatatcggaacaacgtcaacaacgagaaaaaagatttaatattacagtatcgaaaaatgctgaagcaataatggaatctagatctatgataacttctatgccaacacaaacaccatccttgggagtagtttatgataaagataaaagaattcagatgttagaggatgaagtggttaatcttagaaatcaacgatctaatacaaaatcatctgataatttagataattttaccaaaatactatttggtaagactccgtacaaatcaacagaagttaataagcgtatagccatcgttaattatgcaaatttgaacgggtcccccttatcagtcgaggacttggatgtttgttcggaggatgaaatagatagaatctataaaacgattaaacaatatcacgaaagtagaaaacgaaaaattatcgtcactaacgtgattattattgtcataaacattatcgagcaggcattgctaaaactcggatttgaagaaatcaaaggactgagtaccgatatcacttcagaaattatcgatgtggagatcggagatgactgcgatgctgtagcatctaaactaggaatcggtaacagtccggttcttaatattgtattgtttatactcaagatattcgttaaacgaattaaaattatttaatttaatacattcccatatccagacaacaatcgtctggattaatctgttcctgtcgtctcataccggacgacatattaatctttttattagtgggcatctttttagatggtttctttttcccagcattaactgagtcgatacctagaagatcgtgattgatctctccgaccattccacgaacttctaattggccgtctctgacggtaccataaactattttaccagcattagtaacagcttggacaatctgaccatccatcgcattgtacgatgtagtagtaactgttgttctacgtctaggagcaccagaagtatttttggagcccttggatgttgatgtagaagaagacgaggattttgattttggtttacatgtaatacattttgaactctttgattttgtatcacatgcgccggcagtcacatctgtttgagaattaagattattgttgcctcctttgacggctgcatctccaccgatttgcgctagtagatttttaagctgtggtgtaatcttattaactgtttcgatataatcatcgtaactgcttctaacggctaaattttttttatccgccatttagaagctaaaaatatttttatttatgcagaagatttaactagattatacaatgaactaatatgatccttttccagattatttacaaacttggtattttttggttctggaggaggcgaatttaaattcggacttggattcggattttgtaagttcttgatcttattatacatcgagtataggatggcgacagtaactgctacacaaataccgatcaaaagaagaataccaatcatttattgacaataacttcactattgatcaagtatgcaatatatcatcttttcactaaataagtagtaataatgattcaacaatgtcgagatatatggacgataataatttagttcatggaaatatcgctatgattggtgtgaatgactccgctaactctgtggggtgcgcagtgctttccccacatagaataaattagcattccgactgtgataataataccaagtataaacgccataatactcaatactttccatgtacgagtgggactggtagacttactaaagtcaataaaggcgaagatacacgaaagaatcaaaagaatgattccagcgattagcacgccggaaaaataatttccaatcataagcatcatgtccatttaactaataaaaattttaaatcgccgaatgaacaaagtggaatataaaccatataaaaacaatagtttgtactgcaaaaataatatctatttttgttttcgaagatatggtaaaattaaatagtagtacacagcatgttataactaacagcagcaacggctcgtaattacttatcatttactagacgaaaaggtggtgggatattttcttgctcaaataatacgaatatatcacccatccattttatgcgatgtttatatactctaatctttaatagatctatagacgacgggtttaccaacaatatagattttatcgattcatctaatttaaacccttccttaaacgtgaatgatctattatctggcataacgatgaccctacctgatgaatcggacaatgtactgggccatgtagaataaattatcaacgaattatcgtctacgaacatttatatcatttgttttaattttaggacgcgaataaatggatataaaatagaaaataacagatattacaaccagtgttatggccgcgcccaaccaggtaggcagttttattttatcttttactacaggttctcctggatgtacgtcaccaacggcggacgtagttctagtacaattagacgtaagttccgcttgggaattttttaacgctaaagagttaacgttaatcgtgcacccaacgtatttacatctagttcgttgaacatcttgattataatataaccattttctatctctagattcgtcagtgcactcatgtaaccaacataccctaggtcctaaatatttatctccggaattagattttggataattcgcgcaccaacaatttctatttcctttatgatcgttacaaaagacgtataatgccgtatccccaaaagtaaaataatcaggacgaataattctaataaactcagaacaatatctcgcatccatatgtttggagcaaatatcggaataagtagacatagccggtttccgttttgcacgtaaccattctaaacaattggggtttccaggatcgtttctacaaaatccagtcatgaaatcgtcacaatgttctgtcttgtaattattattaaatatttttggacagtgtttggtatttgtcttagaacaacattttgccacgctatcactatcgcccaggagataatccttttttataaaatgacatcgttgcccggatgctatataatcagtagcgtgttttaaatccttaatatattcaggagttacctcgttctgataatagattaatgatccaggacgaaatttgaaagaactacatggttctccatgaattaatacatattgtttagcaaattcaggaactataaaactactacaatgatctatcgacataccatctatcaaacaaaacttgggtttaatttctcccggagatgtttcataatagtacgtataactttcttctgcaaacttaacagctctattatattcaggataattaaaacctaattccatatatttgtctcgtatatctgctattcctggtgctattttgattctattaagagtaacagctgcccccattcttaataatcgtcagtatttaaactgttaaatgttggtatatcaacatctaccttatttcccgcagtataaggtttgttgcaggtatactgttcaggaatggttacatttatacttcttctatagtcctgtctttcgatgttcatcacatatgcaaagaacagaataaacaaaataatgtaagaaataatattaaatatctgtgaattcgtaaatacattgattgccataataattacagcagctacaatacacacaatagacattcccacagtgttgccattacctccacgatacatttgagttactaagcaataggtaataactaagctagtaagaggcaatagaaaagatgagataaatatcatcaatatagagattagaggagggctatatagagccaagacgaacaaaatcaaaccgagtaacgttctaacatcattatttttgaagattcccaaataatcattcattcctccataatcgttttgcatcatacctccatctttaggcataaacgattgctgctgttcctctgtaaataaatctttatcaagcactccagcacccgcagagaagtcgtcaagcatattgtaatatcttaaataactcatttatatattaaaaaatgtcactattaaagatggagtataatctttatgccgaactaaaaaaaatgacttgtggtcaacccctaagtctttttaacgaagacggggatttcgtagaagttgaaccgggatcatcctttaagtttctgatacctaagggattttacgcctctccttccgtaaagacgagtctagtattcgagacattaacaacgaccgataataaaatcactagtatcaatccaacaaatgcgccaaagttatatcctcttcaacgcaaagtcgtatctgaagtagtttctaatatgaggaaaatgatcgaatcaaaacgtcctctatacatcactcttcacttggcgtgtggatttggtaagactattaccacgtgttatcttatggctacacacggtagaaaaaccgtcatttgcgtacccaataaaatgttaatacatcaatggaagacacaggtagaggcagtcggattggaacataagatatccatagatggagtaagtagtctattaaaggaactaaagactcaaagtccggatgtattaatagtagtcagtagacatctgacaaacgatgccttttgtaaatatatcaataagcattatgatttgttcatcttggatgaatcacatacgtataatctgatgaacaatacagcagttacaagatttttagcgtattatcctccgatgatgtgttattttttaactgctacacctagaccatctaaccgaatttattgtaacagtattattaatattgccaagttatccaatctaaaaaaaactatctatgcagtagatagtttttttgagccatattccacagataatattagacatatggtaaaacgactagatggaccatctaataaatatcatatatataccgagaagttattatctgtagacgagcctagaaatcaacttattcttgataccctggtagaagaattcaagtcaggaactattaatcgcattttagttattactaaactacgtgaacatatggtattattctacaaacgattattagattttttcggaccagaggttgtatttataggagacgcccaaaatagacgtactccagatatggtcaaatcaatcaaggaactaaatagatttatattcgtatccaccttattttattccggtactggtttagatattcctagtttggattcgttgttcatttgctcggcagtaatcaacaatatgcaaatagagcaattactagggagggtatgtcgagaaacagaactattagataggacggtatatgtatttcctaacacatccatcaaagaaataaagtacatgataggaaatttcatgcaacgaattattagtctgtctgtagataaactaggatttaaacaaaaaagttatcggaaacatcaagaatccgatcccacttctgcatgtacaacatcatccagagaagaacgtgtattaaatagaatatttaactcgcaaaatcgttaagaagtttaagcgacgatccgcatgctgcgcaggccagtgtattacccctcatagtattaatataatccaatgatacttttgtgatgtcggaaatcttaaccaatttagactgacaggcagaacacgtcatgcaatcatcatcgtcatcgataactgtagtcttgggcttctttttgcgactcttcattccggaacgcacattggtgctatccatttaggtagtaaaaaataagtcagaatatgccctataacacgatcgtgcaaaacctggtatatcgtctctatctttatcacaatatagtgtatcgacatttttattattattgacctcgtttatcttggaacatggaatgggaacatttttgttatcaacggccatctttgccttaattccagatgttgtaaaattataactaaacagtctatcatcgacacaaatgaaattcttgtttagacgtttgtagtttacgtatgcggctcgttcgcgtctcattttttcagatattgcaggtactataatattaaaaataagaatgaaataacataggattaaaaataaagttatcatgacttctagcgctgatttaactaacttaaaagaattacttagtctgtacaaaagtttgagattttcagattctgcggctatagaaaagtataattctttggtagaatggggaacatctacttactggaaaataggcgtgcaaaaggtagctaatgtcgagacgtcaatatctgattattatgatgaggtaaaaaataaaccgtttaatattgatccgggctattacattttcttaccggtatattttgggagcgtctttatttattcgaagggtaaaaatatggtagaacttggatctggaaactcttttcaaataccagatgatatgcgaagtgcgtgtaacaaagtattagacagcgataacggaatagactttctgagatttgttttgttaaacaatagatggataatggaagatgctatatcaaaatatcagtctccagttaatatatttaaactagctagtgagtacggattaaacatacccaaatatttagaaattgaaatagaggaagacacattatttgacgacgagttatactctattatagaacgctctttcgatgataaatttccaaaaatatccatatcgtatattaagttgggagaacttagacggcaagttgtagactttttcaaattctcattcatgtatattgagtccatcaaggtagatcgtataggagataatatttttattcctagcgttataacaaaatcaggaaaaaagatattagtaaaagatgtagaccatttaatacgatccaaggttagagaacatacatttgtaaaagtaaaaaagaaaaacacattttccattttatacgactatgatggaaacggaacagaaactagaggagaagtaataaaacgaattatagacactataggacgagactattatgttaacggaaagtatttctctaaggttggtagtgcaggcttaaagcaattgactaataaattagatattaatgagtgcgcaactgtcgatgagttagttgatgagattaataaatccggaactgtaaaacgaaaaataaaaaaccaatcagcatttgatttaagcagagaatgtttgggatatccagaagcggattttataacgttagttaataacatgcggttcaaaatagaaaattgtaaggttgtaaatttcaatattgaaaatactaattgtttaaataacccgagtattgaaactatatatggaaactttaaccagttcgtctcaatctttaatgtcgtcaccgatgtcaaaaaaagattattcgagtgaaataatatgcgcctttgatataggtgcaaaaaatcctgccagaactgttttagaagtcaaggataactccgttagggtattggatatatcaaaattagactggagttctgattgggaaaggcgcatagctaaagatttgtcacaatatgaatacactacagttcttctagaacgtcagcctagaaggtcgccgtatgttaaatttatctattttattaaaggctttttatatcatacatcggctgccaaagttatttgcgtctcgcctgtcatgtctggtaattcatatagagatcgaaaaaagagatcggtcgaagcatttcttgattggatggacacattcggattgcgagactccgttccggatagacgcaaattagacgatgtagcggatagtttcaatttggctatgagatacgtattagataaatggaatactaattatacaccttataataggtgtaaatctagaaattacataaaaaaaatgtaataacgttagtaacgccattatggataatctatttacctttctacatgaaatagaagatagatatgccagaactatttttaactttcatctaataagttgcgatgaaataggagatatatatggtcttatgaaagaacgcatttcctcagaggatatgtttgataatatagtgtataataaagatatacatcctgccattaagaaactagtgtattgcgacatccaacttactaaacacattattaatcagaatacgtatccggtatttaacgattcttcacaagtgaaatgttgtcattatttcgacataaactcagataatagcaatattagctctcgtacagtagagatatttgagagggaaaagtcatctcttgtatcatatattaaaactaccaataagaagagaaaggtcaattacggcgaaataaagaaaactgttcatggaggcactaatgcaaattacttttccggtaaaaagtctgacgagtatctgagtactacagttagatccaacattaatcaaccttggatcaaaaccatctctaagaggatgagagttgatatcattaatcactctatagtaacgcgtggaaaaagctctatattacaaactatagaaattatttttactaatagaacatgtgtgaaaatattcaaggattctactatgcacattattctatccaaggacaaggatgaaaaggggtgtatacacatgattgacaaattattctatgtctattataatttatttctgttgttcgaagatatcatccaaaacgagtactttaaagaagtagctaatgttgtaaaccacgtactcacggctacggcattagatgagaaattattcctaattaagaaaatggctgaacacgatgtttatggagttagcaatttcaaaatagggatgtttaacctgacatttattaagtcgttggatcataccgttttcccctctctgttagatgaggatagcaaaataaagttttttaaggggaaaaagctcaatattgtagcattacgatctctggaggattgtataaattacgtgactaaatccgagaatatgatagaaatgatgaaggaaagatcgactattttaaatagcatagatatagaaacggaatcggtagatcgtctaaaagaattgcttctaaaatgaaaaaaaacactaattcagaaatggatcaacgactagggtataagtttttggtgcctgatcctaaagccggagttttttatagaccgttacatttccaatatgtatcgtattctaattttatattgcatcgattgcatgaaatcttgaccgtcaagcggccactcttatcgtttaagaataatacagaacgaattatgatagaaattagcaatgttaaagtgactcctccagattactcacctataatcgcgagtattaaaggtaagagttatgacgcattagccacgttcactgtaaatatctttaaagaggtaatgaccaaagagggtatatccatcactaaaataagtagttatgagggaaaagattctcatttgataaaaattccgctactaataggatacgggaataaaaatccacttgatacagccaagtatcttgttcctaatgtcataggtggagtctttatcaataaacaatctgtcgaaaaagtaggaattaatctagtagaaaagattacaacatggccaaaatttagggttgttaagccaaactcattcactttctcgttttcctccgtatcccctcctaatgtattaccgacaagatatcgccattacaagatatctctggatatatcacaattggaagcgttgaatatatcatcgacaaagacatttataacggtcaatattgttttgctgtctcaatatttatctagagtgagtctagaattcattagacgtagtttatcatacgatatgcctccagaagttgtctatctagtaaacgcgataatagatagtgctaaacgaattactgaatctattactgactttaatattgatacatacattaatgacctggtggaagctgaacacattaaacaaaaatctcagttaacgatcaacgagttcaaatatgaaatgctgcataactttttacctcatatgaactatacacccgatcaactaaagggattttatatgatatctttactaagaaagtttctctactgtatcttccacacttctagatatccagatagagattcgatggtttgtcatcgcatcctaacgtacggcaaatattttgagacgttggcacatgatgaattagagaattacataggcaacatccgaaacgatatcatgaacaatcacaagaacagaggcacttacgcggtaaacattcatgtactaacaactcccggacttaatcacgcgttttctagcttattgagtggaaagttcaaaaagtcagacggtagttatcgaacacatcctcactattcatggatgcagaatatttctattcctaggagtgttggattttatccggatcaagtaaagatttcaaagatgttttctgtcagaaaataccatccaagtcaatatctttacttttgttcatcagacgttccggaaagaggtcctcaggtaggtttagtatctcaattgtctgtcttgagttccattacaaatatactaacgtctgagtatttggatttggaaaagaaaatttgtgagtatatcagatcatattataaagatgatataagttactttgaaacaggatttccaatcactatagaaaatgctctagtcgcatctcttaatccaaatatgatatgtgattttgtaactgactttagacgtagaaaacggatgggattcttcggtaacttggaggtaggtattactttagttagggatcacatgaatgaaattcgcattaatattggagcgggaagattagtcagaccattcttggttgtggataacggagagctcatgatggatgtgtgtccggagttagaaagcagattagacgacatgacattctctgacattcagaaagagtttccgcatgtcatcgaaatggtagatatagaacaatttacttttagtaacgtatgtgaatcggttcaaaaatttagaatgatgtcaaaggatgaaagaaagcaatacgatttatgtgactttcctgccgaatttagagatggatatgtagcatcttcattagtgggaatcaatcacaattctggacccagagctattcttggatgtgctcaagctaaacaagctatctcttgtctgagctcggatatacgaaataaaatagacaatggaattcatttgatgtatccagagaggccaatcgtgattagtaaggctttagaaacttcaaagattgcggctaattgcttcggccaacatgttactatagcattaatgtcgtacaaaggtatcaatcaagaggatggaattatcatcaaaaaacaatttattcagagaggcggtctcgatattgttacagccaagaaacatcaagtagaaattccattggaaaactttaataacaaagaaagagataggtctaacgcctattcaaaattagaaagtaatggattagttagactgaatgctttcttggaatccggagacgctatggcacgaaatatctcatcaagaactcttgaagatgattttgctagagataatcagattagcttcgatgtttccgagaaatataccgatatgtacaaatctcgcgttgaacgagtacaagtagaacttactgacaaagttaaggtacgagtattaaccatgaaagaaagaagacccattctaggagacaaatttaccactagaacgagtcaaaagggaacagtcgcgtatgtcgcggatgaaacggaacttccatacgacgaaaatggtatcacaccagatgtcattattaattctacatccatcttctctagaaaaactatatctatgttgatagaagttattttaacagccgcatattctgctaagccgtacaacaataagggagaaaaccgacctgtctgttttcctagtagtaacgaaacatccatcgatacatatatgcaattcgctaaacaatgttatgagcattcaaatccgaaattgtccgatgaagaattatcggataaaatcttttgtgaaaagattctctatgatcctgaaacggataagccttatgcatccaaagtattttttggaccaatttattacttgcgtctgaggcatttaactcaggacaaggcaaccgttagatgtagaggtaaaaagacgaagctcattagacaggcgaatgagggacgaaaacgtggaggaggtatcaagttcggagaaatggagagagactgtttaatagcgcatggtgcagccaatactattacagaagttttgaaagattcggaagaagattatcaagatgtgtatgtttgtgaaaattgtggagacatagcagcacaaatcaagggtattaatacatgtcttagatgttcaaaacttaatctctctcctctcttaacaaaaattgataccacgcacgtatctaaagtatttcttactcaaatgaacgccagaggcgtaaaagtcaaattagatttcgaacgaaggcctccttcgttttataaaccattagataaagttgatctcaagccgtcttttctggtgtaatattctagtttggtagtagatacatatcaatatcatcaaattcgagatccgaattataaaatgggcgtggattgttaactatagaatcggacgtctgatattcgaaaatctgtggagtttcaggttttggtggaggtgtaactgctacttgggatactgaagtctgatattcagaaagctgtggatgttctggttcggcatccaccgatggtgtcacatcactaatcggttcggtaacgtctgtggatggaggtgctacttctacagaacctgtagcctcagttgtcaacggagatacatttttaatgcgagaaaatgtataatttggtaatggtttcttatgtggatctgaagaagaggtaagatatctactagaaagataccgatcacgttctagttctcttttgtagaacttaactttttctttctccgcatctagttgatattccaacctcttcacgttactacgttcagattccaattcacgttcgcatgggttacctccgcagtttttacgagcgatttcacgttcagccttcatgcgtctctccctctctctatcgagtttatcagagcagtctttctgaaggcgatcgaactccataaatttctccaacgctttgattgtttccatagatttccgaagttcagcttttaggactgtgattctttttctttcgaattcacagctggatgtacaaccgtttccattaccgccatctctaagtttcttttctagatcggcaacatttcatccccatgccttttacattcctcgagtctactgtcgtcgaaatatcgttccagctccttttcgacatcaataactttagcacgttgtctctcaagctctcttttgtagttatctgattccctggcacgtttaagatcttcatgcaattgagtcagctcttaacttcctctcttgcttcttcgtcatagtacgcgcaatcactgtgagatccattgttaccacgtctacactcggcgagctcgcgtttaagagattcaatttcccgtttgtattggtccatgtttccattgctaccaccattagatttacaggctgctagttgtcgttcgagatcagaaatacgggttttcttggaattgatttcgtcgatgtacttggcatcgaaacacttattaagttctttttccaattctacgattttatttctttcgcgagtcaattccctcctgtagtaactatctgttttgtcagattcacgctctctacgtagactttcttgcaagttactaatttgttccctagcacgtccgagtttagttttatatgctgaatagagttctgattcatcctttgagcagatctctagcgatcgtttaagattcctaattctagtctttagcctatttacctcctcagaagatgttccgttaccgttgcgtttacactcgttaagctgtctatcaagatccatgattctatctctaagacgttgcatctctctttccatatcagcattgctttcattattacgtctgcagtcactcaactgtctttcaatatctgagattctatctctaagacgtcgcatctctctctgtttcggcattggtttcattattacgtttacagtcgttcaactgtctttcaagatctgatattctagattggagtctgctaatctctgtagcattttcacggcattcactcagttgtctttcaagatctgaaattttagattggagtctgctaatctctgtaagatttcctcctccgctctcgatgcagtcggtcaacttattctctagttctctaatacgcgaacgcagtgcatcaacttcttgcgtgtcttcctggttgcgtgtacattcatcgagatctctaacgcgtcgtcgttcttcctcaagttctctgcgtactacagaaagcgtgtccctatcttgttgatatttagcaatttctgattctagagtactgattttgcttacgtagttactaatagttgtcttggccttatcaagatcctccttgtatttgtcgcattccttgatatccctacgaagtctggacagttcccattcgacattacgacgtttatcgatttcagctcggagatcgtcatcgcgttgttttagccacatacgactgagttcaagttctcgttgacaagatccatctacttttccattcctaatagtatccagttccttttctagttctgaacgcatttctcgttccctatcaagcgattctctcaattctcggatagtcttcttatcaatttctaataaatctgaaccatcatctgtcccattttgaatatccctgtgttctttgatctcttttgtaagtcggtcgattctttcggttttataaacagaatccctttccaaagtcctaatcttactgagtttatcactaagttctgcattcaattcggtgagttttctcttggcttcttccaactctgttttaaactctccactatttccgcattcttcctcgcatttatctaaccattcaattagtttattaataactagttggtaatcagcgattcctatagccgttcttgtaattgtgggaacataattaggatcttctaatggattgtatggcttgatagcatcatctttatcattattagggggatggacaaccttaattggttggtcctcatctcctccagtagcgtgtggttcttcaataccagtgttagtaataggcttaggcaaatgcttgtcgtacgcgggcacttcctcatccatcaagtatttataatcgggttctacttcagaatattcttttctaagagacgcgacttcgggagttagtagaagaactctgtttctgtatctatcaacgctggaatcaatactcaagttaaggatagcgaatacctcatcgtcatcatccgtatcttctgaaacaccatcatatgacatttcatgaagtctaacgtattgataaatagaatcagatttagtattaaacagatccttaacctttttagtaaacgcatatgtatattttagatctccagatttcataatatgatcacatgccttaaatgtcagtgcttccatgatataatctggaacactaatgggtgacgaaaaagatacagcaccatatgctacgttgataaataaatctgaaccactaagtagataatgattaatgttaagaaagaggaaatattcagtgtataggtatgtcttggcgtcatatcttgtactaaacacgctaaacagtttgttaatgtgatcaatttccaatagattaattagagcagcgggaataccaacaaacatattaccacatccgtattttctatgaatatcacatatcatgttaaaaaatcttgatagaagagcgaatatctcgtctgacttaatgagtcgtagttcagcagcaacataagtcataactgtaaatagaacatactttcctgtagtgttgattctagactccacatcaacaccattattaaaaatagttttatatacatctttaatctgctctccgttaatcgtcgaacgttctagtatacggaaacactttgatttcttatctgtagttaatgacttagtgatatcacgaagaatattacgaattacatttcttgtttttcttgagagacctgattcagaactcaactcatcgttccatagtttttctacctcagtggcgaaatctttggagtgcttggtacatttttcaataaggttcgtgacctccatttattataaaaaatttattcaaaacttaactacaatcgggtaattataagatcgtagatctcccatgtggcggaatactaccatctatcgcatgtggatggacagtaggtaatggccatgggaacagtaatgtttgcatatttatctttcttgctagtattactgcatattgtcccaatgtttcgatgtgatgttctaacctatcaactgccgctgtatcacaacaatagtgtccgatgaaattaagattatgatccaatgtgtttaatatatgattatcaagtcttatacgatccgcgtcttttttgacaggatcaggttcttctacaggaagaagtttcggcctcttatgatattcatgtctgggaaacggtggtctagggtgaggctccggtatcggagtgggttttggattataatcatcatcgtctatgacatcatcttcgacttcgatatttattttgctatcttgatgatgtcctgtatcagttgcattttcagcactcgactgaatattagcgcattcattgtctattattaccatatttctaaacccaaaatgtatgtgttgaacatcagtactatcgttgatgagtcttatagcatgaattcgcttatcgttatcgggtttatcttctgtcaccttagcaattccttttttattaaactctacataatcatatccatttctattgtttgttctaatataaacgagtatagcatcattgctaaatttttcaatagtatcaaaaacagaatatcctaaaccatataatatatattcaggaacactcaaactaaatgtccaggattctcctaaatacgtaaactttaatagtgcgaaatcattcaaaaatctaccacttatagatagatagtacataaatgcgtatagtagtctacctatctctttattatgaaaaccggcattacgatcatatatgtcgtgatatacctgtgatccgtttacgttaaaccataaatacatgggtgatcctataaacatgaatttatttctaattctcagagctatagttaattgaccgtgtaatatttgcttacatgcatacttgatacgcttattaataagatttttatcattgctcgttatttcagaatcgtatatataaggagtaccatcgtgattcttaccagatattatacaaaatactatatataaaatatattgacccacgttagtaatcatataaatgtttaacgttttaaattttgtattcaatgatccattatcatacgctatcatggtcttgtaatattcattctttaaaatataatattgtgttagccattgcattggagctcctaatggagattttctattctcatccattttaggataggctttcataaagtccctaataacttcgtgaataatgtttctatgttttctactgatgcatgtatttgcttcgatttttttatcccatgtttcatctatcatagatttaaacgcagtaatgctcgcaacattaacatcttgaaccgttggtacaattccgttccataaatttataatgttcgccatttatataactcattttttgaatatacttttaattaacaaaagagttaagttactcatatggacgccgtccagtctgaacatcaatctttttagccagagatatcatagccgctcttagagtttcagcgtgattttccaacctaaatagaacttcatcgttgcgtttacaacacttttctatttgttcaaactttgttgttacattagtaatctttttttccaaattagttagccgttgtttgagagtttcctcattgtcgtcttcatcggctttaacaattgcttcgcgtttagcctctggctttttagcagcctttgtagaaaaaaattcagttgctggaattgcaagatcgtcatctccggggaaaagagttccgtccatttaaagtacagattttagaaactgacactctgcgttatttatatttggtacaacacatggattataaatattgatgttaataacatcagaaaatgtaaagtctatacattgttgcatcgtgttaaattttctaatggatctagtattattgggtccaacttctgcctgaaatccaaatatggaagcggatacaaaaccgtttcctggataaaccacacatctccacttttgctttacatcagaaattgtgtcgttgacatcttgaactctcctatctaatgccggtgttccacctatagattttgaatattcgaatgctgcatgagtagcattaaattccttaatattgccataattttcatatattgagtaaccctggataaaaagtaaacacaccgcagccgtcgctaccacaataaaaaaaattgatagagagttcatttataatctattagaagctgacaaaatttttttacacgcatcagacaatgctttaataaatagttcaacatctacttttgtcatatcgaaccgatggtatgattctaacctagaattacatccgaaaaagttgactatgttcatagtcattaagtcattaacaaacaacattccagactctggattataagacgatactgtttcgtcacaattacctaccttaatcatgtgattatgaatattggctattagagcaccttctaagaaatctataatatctttgaaacacgatttaaaatcaaaccacgaatatacttctacgaagaaagttagtttacccataggagaaataactataaatggagatctaaatacaaaatccggatctatgatagttttaacattattatattctctattaaatacctccacatctaaaaatgttaattttgaaactatgtcttcgtttattaccgtacctgaactaaacgctataagctctattgtttgagaactctttaaacgatattcttgaaatacatgtaacaaagtttcctttaactcggtcggtttatctaccatagttacagaatttgtatccttatctataatataataatcaaaatcgtataaagttatataattatcgcgttcagattgtgatcttttcaaatagactaaaaaccccatttctctagtaagtatcttatgtatatgtttgtaaaatatcttcatggtgggaatatgctctaccgcagttagccattcctcattgacagcggtagatgtattagacaaaactattccaatgtttaacaagggccattttacgagattattaaatccttgtttgataaatgtagccaatgagggttcgagttcaacgacgattgaattctcttcccgcggatgctgcatgatgaacgacgggatgttgttcgattgatttggaattctttttcgactttttgtttatattaaatattttaaaatttatagcggatagcaattcatgtaccacggataatgtagacgcgtattgcgcatcgatatctttattattagataaatttatcaataaatgtgagaagtttgcctcgttaaggtcttccatttaaatattatataaacatttgtgtttgtatcttattcgtcttttatggaatagttttttactagtaaagctgcaattacacactttgtccgtaaaacataaatataaacaccagcttttatcaatcgttccaaaaagtcgacggcggacatttttaacatggcatctattttaaatacacttaggtttttggaaaaaacatcattttataattgtaacgattcaataactaaagaaaagattaagattaaacataagggaatgtcatttgtattttataagccaaagcattctaccgttgttaaatacttgtctggaggaggtatatatcatgatgatttggttgtattggggaaggtaacaattaataatctaaagatgatgctattttacatggatttatcatatcatggagtgacaagtagtggagcaatttacaaattgggatcgtctatcgatagactttctctaaataggactattgttacaaaagttaataattatgatgatacattttttgacgacgatgattgatcgctattgcacaattttgtttttgtactttctaatatagtgtttaggttctttttcatatgagaatattgatttactaaaatatctatgtttaacttttgttctatgacgtccttatcggcggtatcggtacatatacgtaattcaccttcacaaaatacggagtcttcgataataatagccaatcgattattggatctagctgtctgtatcatattcaacatgtttaatatatcctttcgtttcccctttacaggcatcgatcgtagcatattttccgcgtctgatatggaaatgttaaaactacaaaaatgcgtaatgttagcccgtcctaatattggtacgtgtctataagtttggcatagtagaataatagacgtgtttaaatgccttccaaagtttaagaattctattagagtattgcattttgatagtttatcgcctacatcatcaaaaataagtaaaaagtgtgctgattttttatgattttgtgcgacagcaatacatttttctatgttacttttagttcgtatcagattatattctagagattcctgactactaacgaaattaatatgatttggccaaatgtatccatcataatctgggttataaacgggtgtaaacaagaatatatgtttatattttttaactagtgtagaaaacagagatagtaaatagatagtttttccagatccagatcctcctgttaaaaccattctaaacggcatttttaataaattttctcttgaaaattgtttttcttggaaacaattcataattatatttacagttactaaattaatttgataataaatcaaaatatggaaaactaaggttgttagtagggaggagaacaaagaaggcacatcgtgatataaataacatttattatcatgatgacaccagaaaacgacgaagagcagacatctgtgttctccgctactgtttacggagacaaaattcagggaaagaataaacgcaaacgcgtgattggtctatgtattagaatatctatggttatttcactactatctatgattaccatgtccgcgtttctcatagtgcgcctaaatcaatgcatgtctgctaacgaggctgctattactgacgccgctgttgccgttgctgctgcatcatctactcatagaaaggttgcgtctagcactacacaatatgatcacaaagaaagctgtaatggtttatattaccagggttcttgttatatattacattcagactaccagttattctcggatgctaaagcaaattgcactgcggaatcatcaacactacccaataaatccgatgtcttgactacctggctcattgattatgttgaggatacatggggatctgatggtaatccaattacaaaaactacatccgattatcaagattctgatgtatcacaagaagttagaaagtatttttgtgttaaaacaatgaactaatatttatttttgtacattaataaatgaaatcgcttaatagacaaactgtaagtaggtttaagaagttgtcggtgccggccgctataatgatgatactctcaaccattattagtggcataggaacatttctgcattacaaagaagaactgatgcctagtgcttgcgccaatggatggatacaatacgataaacattgttatttagatactaacattaaaatgtctacagataatgcggtttatcagtgtcgtaaattacgagctagattgcctagacctgatactagacatctgagagtattgtttagtattttttataaagattattgggtaagtttaaaaaagaccaatgataaatggttagatattaataatgataaagatatagatattagtaaattaacaaattttaaacaactaaacagtacgacggatgctgaagcgtgttatatatacaagtctggaaaactggttaaaacagtatgtaaaagtactcaatctgtactatgtgttaaaaaattctacaagtgacaacaaaaaatgaattaataataagtcgttaacgtacgccgccatggacgccgcgtttgttattactccaatgggtgtgttgactataacagatacattgtatgatgatctcgatatctcaatcatggactttataggaccatacattataggtaacataaaaactgtccaaatagatgtacgggatataaaatattccgacatgcaaaaatgctactttagctataagggtaaaatagttcctcaggattctaatgatttggctagattcaacatttatagcatttgtgccgcatacagatcaaaaaataccatcatcatagcatgcgactatgatatcatgttagatatagaagataaacatcagccattttatctattcccatctattgatgtttttaacgctacaatcatagaagcgtataacctgtatacagctggagattatcatctaatcatcaatccttcagataatctgaaaatgaaattgtcgtttaattcttcattctgcatatcagacggcaatggatggatcataattgatgggaaatgcaatagtaattttttatcataaaagttgtaaagtaaataataaaacaataaatattgaactagtagtacgtatattgagcaatcagaaatgatgctggtacctcttatcacggtgaccgtagttgcgggaacaatattagtatgttatatattatatatttgtaggaaaaagatacgtactgtctataatgacaataaaattatcatgacaaaattaaaaaagataaagagttctaattccagcaaatctagtaaatcaactgatagcgaatcagactgggaggatcactgtagtgctatggaacaaaacaatgacgtagataatatttctaggaatgagatattggacgatgatagcttcgctggtagtttaatatgggataacgaatccaatgttatggcgcctagcacagaacacatttacgatagtgttgctggaagcacgctgctaataaataatgatcgtaatgaacagactatttatcagaacactacagtagtaattaatgaaacggagactgttgaagtacttaatgaagataccaaacagaatcctaactattcatccaatcctttcgtaaattataataaaaccagtatttgtagcaagtcaaatccgtttattacagaacttaacaataaatttagtgagaataatccgtttagacgagcacatagcgatgattatcttaataagcaagaacaagatcatgaacacgatgatatagaatcatcggtcgtatcattggtgtgattagtttcctttttataaaattgaagtaatatttagtattattgctgccgtcacgttgtacaaatggagatattccctgtattcggcatttctaaaattagcaattttattgctaataatgactgtagatattatatagatacagaacatcaaaaaattatatctgatgagatcaatagacagatggatgaaacggtacttcttaccaacatcttaagcgtagaagttgtaaatgacaatgagatgtaccatcttattcctcatagattatcgacgattatactctgtattagttctgtcggaggatgtgttatctctatagataatgacatcaatggcaaaaatattctaacctttcccattgatcatgctgtaatcatatccccactgagtaaatgtgtcgtagttagcaagggtcctacaaccatattggttgttaaagcggatatacctagcaaacgattggtaacatcgtttacaaacgacatactatatgtaaacaatctgtcactgattaattatttgccgttgtctgtattcattattagacgagtcaccgactatttggatagacacatatgcgatcagatatttgctaataataagtggtattcccttataaccatcgacgataagcaatatcctattccatcaaactgtataggtatgtcctctgccaagtacataaattctagcatcgagcaagatactttaatccatgtttgtaacctcgagcatccgttcgactcagtatacaaaaaaatgcagtcgtacaattctctacctatcaaggaacaaatattgtacggtagaattgataatataaatatgagcattagtatttctgtggattaatagatttctagtatggggatcattaatcatctctaatctctaaatacctcataaaacgaaaaaaaagctattatcaaatactgtacggaatggattcattctcttctctttttatgaaactctgttgtatatctactgataaaactggaagcaaaaaatctgatagaaagaataagaataagatcaaggattatatggaacacgattattataaaataacaatagttcctggttcctcttccacgtctactagctcgtggtattatacacatgcctagtaatagtctctttgcgttgacggaaagcagactagaaataacaggctaaaatgttcagacaccataatagttcccaacccagataataacagagttccatcaacacattcctttaaactcaatcccaaacccaaaaccgttaaaatgtatccggccaattgatagtagataatgaggtgtacagcgcatgataatttacacagtaaccaaaatgaaaatactttagtaattataagaaatatagacggtaatgtcatcatcaacaatccgataatatgcctgagagtaaacattgacggataaaacaaaaatgctccgcataactctatcatggcaataacacaaccaaatacttgtaagattcctaaattagtagaaaatacaacgaatatcgatgtataagtgatctcgagaaataataagaataaagtaatgcccgtaaagataaacatcaacattgtttggtaatcattaaaccaattagtatgaagttgaactaatttcacagtagattttattccagtgttatcctcgcatgtataagtacctggtaagatatctttatattccataatcaatgagacatcactatctgataacgaatgaagtctagcactagtatgccatttacttaatattgtcgtcttggaagttttattataagttaaaatatcatggttatccaatttccatctaatatactttgtcggattatctatagtacacggaataatgatggtatcattacatgctgtatactctatggtctttgtagttgttataacaaccaacgtatagaggtatatcaacgatattctaactcttgacattttttatttatttaaaatgatacctttgttatttattttattctattttgctaacggtattgaatggcataagtttgaaacgagtgaagaaataatttctacttacttattagacgacgtattatacacgggtgttaatggggcggtatacacattttcaaataataaactaaacaaaactggtttaactaataataattatataacaacatctataaaagtagaggatgcggataaggatacattagtatgcggaaccaataacggaaatcccaaatgttggaaaatagacggttcagacgacccaaaacatagaggtagaggatacgctccttatcaaaatagcaaagtaacgataatcagtcacaacggatgtgtactatctgacataaacatatcaaaagaaggaattaaacgatggagaagatttgacggaccatgtggttatgatttattcacggcggataacgtaattccaaaagatggtttacgaggagcattcgtcgataaagacggtacttatgacaaagtttacattcttttcactgatactatcggctcaaagagaattgtcaaaattccgtatatagcacaaatgtgcctaaacgacgaaggtggtccatcatcattgtctagtcatagatggtcgacgtttctcaaagtcgaattagaatgtgatatcgacggaagaagttatagacaaattattcattctagaactataaaaacagataatgatacgatactatatgtattcttcgatagtccttattccaagtccgcattatgtacctattctatgaataccattaaacaatctttttctacgtcaaaattggaaggatatacaaagcaattgccgtctccagctcctggtatatgtttaccagctggaaaagttgttccacataccacgtttgaagtcatagaacaatataatgtactagatgatattataaagcctttatctaaccaacctatcttcgaaggaccgtctggtgttaaatggttcgatataaaggagaaggaaaatgaacatcgggaatatagaatatacttcataaaagaaaattctatatattcgttcgatacaaaatctaaacaaactcgtagctcgcaagtcgatgcgcgactattttcagtaatggtaactgcgaaaccgttatttatagcagatatagggataggagtaggaatgccacaaatgaaaaaaatacttaaaatgtaatcttaatcgagtacaccacacgacaatgaacaaacataagacagattatgctggttatgcttgctgcgtaatatgcggtctaattgtcggaattatttttacagcgacactattaaaagttgtagaacgtaaattagttcatacaccattaatagataaaacgataaaagatgcatatattagagaagattgtcctactgactggataagctataataataaatgtatccatttatctactgatcgaaaaacctgggaggaaggacgtaatgcatgcaaagctctaaattcaaattcggatctaattaagatagagactccaaacgagttaagttttttaagaagccttagacgaggctattgggtaggagaatccgaaatattaaaccagacaaccccatataattttatagctaagaatgccacgaagaatggaactaaaaaacggaaatatatttgtagcacaacgaatactcccaaactgcattcgtgttacactatataacaattacactacatttttatcataccactacttcggttagatgttttagaaaaaaataaatatcgccgtaccgttcttgtttttataaaaataacaattaacaattatcaaattttttctttaatattttacgtggttgaccattcttggtggtaaaataatctcttagtgttggaatggaatgctgtttaatgtttccacactcatcgtatattttgacgtatgtagtcacatcgtttacgcaatagtcagactgtagttctatcatgcttcctacatcagaaggaggaacagttttaaagtctcttggttttaatctattaccgttagttttcatgaaatcctttgttttatccacttcacattttaaataaatgtccactatacattcttttgttaattttactagatcgtcatgggtcatagaatttataggttccgtagtccatggatccaaactagcaaacttcgcgtatacggtatcgcgattagtgtatacaccaactgtatgaaaattaagaaaacagtttaataaatcaacagaaatatttaatcctccgtttgatacagatgcgccatatttatggatttcggattcacacgttgtttgtctgaggtgttcgtctagtgttgcttctacgtaaacttcgattcccatatattctttattgtcagaatcgcataccgatttatcatcatacactgtttgaaaactaaatggtatacacatcaaaataataaataataacgagtacattctgcaatattgttatcgtaattggaaaaatagtgttcgagtgagttggattatgtgagtattggattgtatattttattttatattttgtaataagaataaaatgctaatgtcaagtttattccaatagatgtcttattaaaaacatatataataaataacaatggctgaatggcataaaattatcgaggatatctcaaaaaataataagttcgaggatgccgccatcgttgattacaagactacaaagaatgttctagctgctattcctaacagaacatttgccaagattaatccgggtgaaattattcctctcatcactaatcgtaatattctaaaacctcttattggtcagaaatattgtattgtatatactaactctctaatggatgagaacacgtatgctatggagttgcttactgggtacgcccctgtatctccgatcgttatagcgagaactcataccgcacttatatttttgatgggtaagccaacaacatccagacgtgacgtgtatagaacgtgtagagatcacgctacccgtgtacgtgcaactggtaattaaaataaaaagtaatattcatatgtagtgtcaattttaaatgatgatgatgaaatggataatatccatattgacgatgtcaataatgccggtattggcatacagttcatcgatttttagatttcattcagaggatgtggaattatgttatgggcatttgtattttgataggatctataatgtagtaaatataaaatataatccgcatattccatatagatataattttattaatcgcacgttaaccgtagatgaactagacgataatgtcttttttacacatggttattttttaaaacacaaatatggttcacttaatcctagtttgattgtctcattatcaggaaacttaaaatataatgatatacaatgctcagtaaatgtatcgtgtctcattaaaaatttggcaacgagtacatctactatattaacatctaaacataagacttattctctacatcggtccacgtgtattactataataggatacgattctattatatggtataaagatataaatgacaagtataatgacatctatgattttactgcaatatgtatgctaatagcgtctacattgatagtgaccatatacgtgtttaaaaaaataaaaatgaactcttaattatgctatgctattagaaatggataaaatcaaaattacggttgattcaaaaattggtaatgttgttaccatatcgtataacttggaaaagataactattgatgtcacacctaaaaagaaaaaagaaaaggatgtattattagcgcaatcagttgctgtcgaagaggcaaaagatgtcaaggtagaagaaaaaaatattatcgatattgaagatgacgatgatatggatgtagaaagcgcgtaatacgatctataaaaataagtatataaatactttttatttactgtactcttactgtgtagtggtgataccctactcgattatttttttaaaaaaaaaatacttattctgattcttctagccatttccgtgttcgtttgaatgccacatcgacgtcaaagataggggagtagttgaaatctagttctgcattgttggtacgcacctcaaatgtagtgttggatatcttcaacgtatagttgttgagtagtgatggttttctaaatagaattctcttcatatcattcttgcacgcgtacatttttagcatccatcttggaatcctagatccttgttctattcccaatggtttcatcaatagaagattaaacatatcgtacgaacacgatggagagtaatcgtagcaaaagtaagcatttcctttaatcttagatcccggatactggatatattttgcagccaacacgtgcatccatgcagcatttcctacatatacccggctatgcaccgcgtcatcatcgactgtacgatacataatgttaccgtgttgcttacattgctcgtaaaagactttcatcaatttgtctccttctccgtaaattccagtgggtcttaggcaacaagtatacaattttgctccattcatgattacggaattattggctttcataaccagttgctcggccatacgtttactttttgcgtatacatgtcctggtgatatatcataaagggtatgctcatggccgatgaatggatcaccgtgtttattgggtcctattgcttccatgctactagtatagatcaaatacttgattcctaggtccacacaagctgccaaaatagtctgtgttccataatagtttactttcatgatttcattatcggtgtattttccaaatacatccactagagcagccgtatgaataatcagatttaccccatctagcgcttctctcaccttatcaaagtcgtttatatcacattgtatatagtttataaccttaactttcgaggttattggttgtggatcttctacaatatctatgactctgatttcttgaacatcatctgcactaattaacagttttactatatacctgcctagaaatccggcaccaccagtaaccgcgtacacggccattgctgccactcataatatcagactacttattctattttactaaataatggctgtttgtataatagaccacgataatatcagaggagttatttactttgaaccagtccatggaaaagataaagttttaggatcagttattggattaaaatccggaacgtatagtttgataattcatcgttacggagatattagtcaaggatgtgattccataggcagtccagaaatatttatcggtaacatctttgtaaacagatatggtgtagcatatgtttatttagatacagatgtaaatatatttacaattattggaaaggcgttatctatttcaaaaaatgatcagagattagcgtgtggagttattggtatttcttacataaatgaaaagataatacattttcttacaattaacgagaatggcgtttgatatatcagttaatgcgtctaaaacaataaatgcattagtttacttttctactcagcaaaataaattagtcatacgtaatgaagttaatgatacacactacactgtcgaatttgatagggacaaagtagttgacacgtttatttcatataatagacataatgacaccatagagataagaggggtgcttccagaggaaactaatattggttgcgcggttagtatgacttacttgtataataagtatagttttaaactgattttagcagaatatataagacacagaaatactatatccggcaatatttattcggcattgatgacactagatgatttggctattaaacagtatggagacattgatctattatttaatgagaaacttaaagtagactccgattcgggactatttgactttgtcaactttgtaaaggatatgatatgttgtgattctagaatagtagtagctctatctagtctagtatctaaacattgggaattgacaaataaaaaatataggtgtatggcattagccgaacatatatctgatagtattccaatatctgagctatctagactacgatacaatctatgtaagtatctacgcggacacactgagagcatagaggataaatttgattattttgaagacgatgattcgtctacatgttctgccgtaaccgacagggaaacggatgtataattttttttatagcgtgaaggatatgataaaaaatataattgttgtatttatcccattccaatcaccttatatgattctgtaacacaataaaggagtcttatagatgtatagaggtcagatactggtttgataaactgtttattccacataagtatgtttgactttatggttagacccgcatactttaacaaatcactgaaaattggagttaggtattgacctctcagaatcagttgccgttctggaacattaaatgtattttttatgatatactccaacgcatttatgtgggcatacaacaagtcattactaatggaatattccaagagttttagttgtctagtatttaacaagagaagagatttcaacagactgtttatgaactcgaatgccgcctcattgtcgcttatattgatgatgtcgaattctcccaatatcatcaccgatgagtagctcatcttgttatcgggatccaagttttctaaagatgtcattaaaccctcgatcatgaatggatttatcatcatcgtttttatgttggacatgagcttagtccgtttgtccacatctatagaagatgatttctgaattatttcatatatctctctctttaactccaggaacttgtcaggatggtctactttaatatgttctcgtctaagagatgaaaatctttggatggttgcacgcgacttttctctaaaggatgacgttgcccaagatcctctcttaaatgaatccatcttatccttggacaagatggacagtctattttccttagatggtttaatatttttgttacccatgatctataaaggtagacctaatcgtctcggatgaccatatatttattttcagttttattatacgcataaattgtaaaaaatatgttaggtttacgaaaatgtctcgtggggcattaatcgtttttgaaggattggacaaatctggaaaaacaacacaatgtatgaacatcatggaatcaataccttcaaacacaataaaataccttaactttcctcagagatccactgtcactggaaagatgatagatgactatctaactcgtaaaaaaacctataatgatcatatagttaatctattattttgtgcaaatagatgggagtttgcatcttttatacaagaacaactagaacagggaattactttaatagttgatagatacgcattttctggagtagcgtatgccgccgctaaaggcgcgtcaatgactctcagtaagagttatgaatctggattgcctaaacccgacttagttatattcttggaatctggtagcaaagaaattaatagaaacgtcggtgaggaaatttatgaagatgttacattccaacaaaaggtattacaagaatataaaaaaatgattgaagaaggagatattcattggcaaattatttcttctgaattcgaggaagatgtaaagaaggagttgattaagaatatagttatagaggctatacacacggttactggaccagtggggcaactgtggatgtaatagtgaaattacattttttataaatagatgttagtacagtgttataaatggatgaagcatattactctggcaacttggaatcagtactcggatacgtgtccgatatgcataccgaactcgcatcaatatctcaattagttattgccaagatagaaactatagataatgatatattaaacaaggacattgtaaattttatcatgtgtagatcaaacttggataatccatttatctctttcctagatactgtatatactattatagatcaagagaactatcagactgagttgattaattcattagacgacaatgaaattatcgattgtatagttaataagtttatgagcttttataaggataacctagaaaatatagtagatgctatcattactctaaaatatataatgaataatccagattttaaaactacgtatgccgaagtactcggttccagaatagccgatatagatattaaacaagtgatacgtaagaatatactacaattgtctaataatatccgcgaacgatatttgtgaaaatattaaaaaaaaatactttttttattaaatgacgtcttttcgtgaatttagaaaattatgctgtgctatatatcacgcatcaggatataaagaaaaatctaaattaattagagactttataacagatagggatgataaatatttgatcattaagctattgcttcccggattagacgatagaatttataacatgaacgataaacaaattataaaattatatagtataatatttaaacaatctcaggaagatatgctacaagatttaggatacggatatataggagacactattaggactttcttcaaagagaacacagaaatccgtccacgagataaaagcattttaactttagaagaagtggatagttttttaactacgttatcatccgtaactaaagaatcgcatcaaataaaattattgactgatgtagcatctgtttgtacatgtaatgatttaaaatgtgtagtcatgcttattgataaagatctaaaaattaaagcgggtcctcggtacgtacttaacgctattagtcctaatgcctatgatgtgtttagaaaatctaataacttgaaagagataatagaaaattcatctaaacaaaatctagactctatatctatttctgttatgactccaattaatcccatgttagcggaatcgtgtgattctgtcaataaggcgtttaaaaaatttccatcaggaatgtttgcggaagtcaaatacgatggtgaaagagtacaagttcataaaaataataacgagtttgccttctttagtagaaacatgaaaccagtactctctcataaagtggattatctcaaagaatacataccgaaagcatttaaaaaagctacgtctatcgtattggattctgaaattgttcttgtagacgaacataatgtaccgctcccgtttggaagtttaggtatacacaaaaagaaagaatataaaaactctaacatgtgtttgttcgtgtttgactgtttgtactttgatggattcgatatgacggacattccattgtacgaacgaagatcttttctcaaagatgttatggttgaaatacccaatagaatagtattctcagagttgacgaatattagtaacgagtctcagttaactgacgtattggatgatgcactaacgagaaaattagaaggattggtcttaaaagatattaatggagtatacgaaccgggaaagagaagatggttaaaaataaagcgagactatttgaacgagggttccatggcagattctgccgatttagtagtactaggtgcctactatggtaaaggagcaaagggtggtatcatggcagtctttctaatgggttgttacgacgatgaatccggtaaatggaagacggttaccaagtgttcaggacacgatgataatacgttaagggagttgcaagaccaattaaagatgattaaaattaacaaggatcccaaaaaaattccagagtggttagtagttaataaaatctatattcccgattttgtagtagaggatccgaaacaatctcagatatgggaaatttcaggagcagagtttacatcttccaagtcccataccgcaaatggaatatccattagatttcctagatttactaggataagagaggataaaacgtggaaagaatctactcatctaaacgatttagtaaacttgactaaatcttaatagttacatacaaactgaaaattaaaataacactatttagttggtggtcgccatggatggtgttattgtatactgtctaaacgcgctagtaaaacatggcgaggaaataaatcatataaaaaatgatttcatgattaaaccatgttgtgaaagagtttgtgaaaaagtcaagaacgttcacattggcggacaatctaaaaacaatacagtgattgcagatttgccatatatggataatgcggtatccgatgtatgcaattcactgtataaaaagaatgtatcaagaatatccagatttgctaatttgataaagatagatgacgatgacaagactcctactggtgtatataattattttaaacctaaagatgccattcctgttatcatatctataggaaaggataaagatgtctgtgaactattaatctcatcagacatatcgtgtgcatgcgtggagttaaattcatatcacgtagccattcttcccatggatgtttccttttttaccaaaggaaatgcatcattgattattctcctgtttgatttctctatcgatgcggcacctctcttaagaagtgtaaccgataataatgttattatatctagacaccagcgtctacatgacgagcttccgagttccaattggttcaagttttacataagtataaagtccgactattgttctatattatatatggttgttgatggatctgtgatgcatgcgatagctgataatagaactcacgcaattattagcaaaaatatattagacaatactacgattaacgatgagtgtagatgctgttattttgaaccacagattaggattcttgatagagatgagatgctcaatggatcatcgtgtgatatgaacagacattgtattatgatgaatttacctgatgtaggcgaatttggatctagtatgttggggaaatatgaacctgacatgattaagattgctctttcggtggctggtaatttaataagaaatcgagactacattcccgggagacgaggatatagctactacgtttacggtatagcctctagataatttttttaagcacgaaataaaaaacataattttaaaccaatctatttcatactattttgtgtgatcaccatggacataaagatagatattagtatttctggtgataaatttacggtgactactaggagggaaaatgaagaaagaaaaaaatatctacctctccaaaaagaaaaaactactgatgttatcaaacctgattatcttgagtacgatgacttgttagatagagatgagatgtttactattctagaggaatattttatgtacagaggtctattaggcctcagaataaaatatggacgactctttaacgaaattaaaaaattcgacaatgatgcggaagaacaattcggtactatagaagaactcaagcagaaacttagattaaattctgaagagggagcagataactttatagattatataaaggtacaaaaacaggatatcgtcaaacttactgtatacgattgcatatctatgataggattgtgtgcatgcgtggtagatgtttggagaaatgagaaactgttttctagatggaaatattgtttacgagcgattaaactgtttattgatgatcacatgcttgataagataaaatctatactgcagaatagactagtatatgtggaaatgtcatagaaagttaaaagttaatgagagcaaaaatatataaggttgtattccatatttgttatttttttctgtaatagttagaaaaatacattcgatggtctatctatcagattattatgtgttataaggtactttttctcataataaactagagtatgagtaagatagtgtttttcaaaacatataaatctaaaattgatggatgagatatacagctattaatttcgaaaatatattttaatctgataactttaaacatggatttttaatggtggtttaacgttttaaaaaaagattttgttattgtagtatatgataatattaaaagatggatataaagaatttgctgactgcatgtactattttttacattactacattggctacggcagatatacctacttcgtcactgccacacgctccggtaaacggggcatgtgacgagggagaatatcttgataagaggcataatcaatgttgtaatcagtgtccacctggagaatttgccaaggttagatgtaatggtaacgataacacaaaatgtgaacgctgcccacctcatacatataccgcaatccccaattactctaatggatgtcatcaatgtagaaaatgcccaacaggatcatttgataaggtaaagtgtaccggaacacagaacagtaaatgttcgtgtcttcctggttggtattgcgctactgattcttcacagactgaagattgtcgagattgtataccaaaaaggagatgtccatgcggatactttggtggaatagatgaacaaggaaatcctatttgtaaatcgtgttgtgttggtgaatattgcgactacctacgtaattatagacttgatccatttcctccatgcaaactatctaaatgtaattaattatgattttgatgataatgttaccatacattatatcgctacttggttagtgtattattcagtatgaagacctattaataattacttatcttttgacgatcttgttataattataatataaaaatacttatggcatagtaactcataattgctgacgcgataaattcgtaataatctgttttgttcaaatttttataaggaatctacaggcataaaaataaaaatataatttataatatactcttacagcgcgccatcatgaataacagcagtgaattgattgctgttattaatggatttagaaatagtggacgattttgtgatattaatatagttattaatgatgaaaggataaacgctcacagactcatcctatctggagcctccgaatatttttccattctgttttccaataattttatcgattctaatgaatacgaagttaatctaagtcatttagattatcaaagtgttaacgatttgatcgattacatttatgggatacctttgagcctaactaacgataacgtgaaatatattctttcaaccgctgattttttacaaattggatctgctattacggagtgtgaaaattacatacttaaaaatctttgttctagaaactgtatcgatttctacatatacgctgataaatataataacaagaaaatagaatcagcgtcgtttaacacaatattacaaaatattttgagactcatcaacgatgaaaactttaaatacttaacagaggaatcaatgataaaaattttaagcgatgatatgttaaatataaaaaatgaggatttcgccccactaattctcattaaatggttagagagtactcaacaaccatgcaccgtcgagttacttaaatgcctcagaatatcattgctttccccacaagttataaaatcactttatagtcatcgactggttagttcaatctacgaatgtataacattcttaaacaatatagcattcttggatgaatcatttcctagataccatagcatcgagttgatatctatcggtataagtaattcgcatgataagatttccataaactgctacaatcataaaaaaaatacatgggaaatgatatcttcacgtagatataggtgtagtttcgcagtggccgtcctggataatattatctatatgatgggtggatatgatcagtccccgtatagaagttcaaaggttatagcgtacaatacatgtacaaattcttggatatatgatataccagagctaaaatatcctcgttctaattgtgggggactggctgatgacgaatacatttattgtataggcggcatacgcgatcaggattcatcgttgacatctagtattgatagatggaagccatcaaaaccatattggcagaagtatgctaaaatgcgcgaaccaaaatgtgatatgggggttgcgatgttaaacggattaatatatgttataggtggaatcgttaaaggtgacacgtgtaccgacgcactagagagtttatcagaagatggatggatgaagcatcaacgtcttccaataaaaatgtccaatatgtcgacgattgttcatgatggcaagatttatatatctggaggttacaacaatagtagtgtagttaatgtaatatcgaatctagtccttagctataattcgatatatgatgaatggaccaaattatcatcattaaacattcctagaattaatcccgctctatggtcagcgcataataaattatatgtaggaggaggaatatctgatgatgttcgaactaatacatctgagacatacgacaaagaaaaagattgttggacattggataatggtcacgtgttaccacgcaattatataatgtataaatgcgaaccgattaaacataaatatccattggaaaaaacacagtacacgaatgattttctaaagtatttggaaagttttataggtagttgatagaacaaaatacataattttgtaaaaataaatcactttttatactaatatgacacgattaccaatacttttgttactaatatcattagtatacgctacaccttttcctcagacatctaaaaaaataggtgatgatgcaactctatcatgtaatcgaaataatacaaatgactacgttgttatgagtgcttggtataaggagcccaattccattattcttttagctgctaaaagcgacgtcttgtattttgataattataccaaggataaaatatcttacgactctccatacgatgatctagttacaactatcacaattaaatcattgactgctagagatgccggtacttatgtatgtgcattctttatgacatcaactacaaatgacactgataaagtagattatgaagaatactccacagagttgattgtaaatacagatagtgaatcgactatagacataatactatctggatctacacattcaccggaaactagttctgagaaacctgattatatagataattctaattgctcgtcggtattcgaaatctaagctcaaaaattgaaaaactagcgtctttttttgctcgaagtcgaccaccatggtgggtgaggatagcgtgctgatcaccgagaacatgcacatgaaactgtacatggagggcaccgtgaacgaccaccacttcaagtgcacatccgagggcgaaggcaagccctacgagggcacccagaccatgaagatcaaggtggtcgagggcggccctctccccttcgccttcgacatcctggctaccagcttcatgtacggcagcaaaacctttatcaaccacacccagggcatccccgacttctttaagcagtccttccctgagggcttcacatgggagaggatcaccacatacgaagacgggggcgtgctgaccgctacccaggacaccagcctccagaacggctgcctcatctacaacgtcaagatcaacggggtgaacttcccatccaacggccctgtgatgcagaagaaaacactcggctgggaggccagcaccgagatgctgtaccccgctgacagcggcctgagaggccatagccagatggccctgaagctcgtgggcgggggctacctgcactgctccctcaagaccacatacagatccaagaaacccgctaagaacctcaagatgcccggcttctacttcgtggacaggagactggaaagaatcaaggaggccgacaaagagacctacgtcgagcagcacgagatggctgtggccaggtactgcgacctgcctagcaaactggggcacagctgattaattaatttttatcgatctaattcaacaatgtctggagagcttcgcaggatcccgactccggaaccaattactgataaagaagatcatacagttacagacactgtctcatacactacagtaagtacatcatctggaattgtcactactaaatcaaccaccgatgatgcggatctttatgatacgtacaatgataatgatacagtaccaccaactactgtaggcggtagtacaacctctattagcaattataaaaccaaggactttgtagaaatatttggtattaccgcattaattatattgtcggccgtggcaattttctgtattacatattatatatataataaacgttcacgtaaatacaaaacagagaacaaagtctagatttttgacttacataaatgtctgggatagtaaaatctatcatattgagcggaccatctggtttaggaaagacagccatagccaaaagactatgggaatatatttggatttgtggtgtcccataccactagatttcctcgtcctatggaacgagaaggtgttgattaccattacgttaacagagaggccatctggaagggaatagccgccggaaactttctagaacatactgagtttttaggaaatatttacggaacttctaaaacagctgtgaatacagcggctattaataatcgtatttgtgtgatggatctaaacatcgacggtgttagaagtcttaaaaatacgtacctaatgccttactcggtgtatataagacctacctctcttaaaatggttgagaccaagcttcgtcgtagaaacactgaagctaacgatgagattcatcgtcgtgtgatgttggcaaaaactgacatggatgaggcaggtgaagccggtctattcgacactattatcattgaagatgatgtgaatttagcatatagtaagttaattcagatactacaggaccgtattagaatgtattttaacactaattagagacttaagacttaaaacttgataattaataatataactcgtttttatatgtgtctatttcaacgtctaatgtattagttaaatattaaaacttaccacgtaaaacttaaaatttaaaatgatatttcattgacagatagatcacacattatgaactttcaaggacttgtgttaactgacaattgcaaaaatcaatgggtcgttggaccattaataggaaaaggtggattcggtagtatttatactactaatgacaataattatgtagtaaaaatagagcccaaagctaacggatcattatttaccgaacaggcattttatactagagtacttaaaccatccgttatcgaagaatggaaaaaatctcacaatataaagcacgtaggtcttatcacgtgcaaggcatttggtctatacaaatccattaatgtggaatatcgattcttggtaattaatagattaggtgcagatctagatgcggtgatcagagccaataataatagactaccaaaaaggtcggtgatgttgatcggaatcgaaatcttaaataccatacaatttatgcacgagcaaggatattctcacggagatattaaagcgagtaatatagtcttagatcaaatagataagaataaattatatctagtggattacggattggtttctaaattcatgtctaatggcgaacatgttccatttataagaaatccaaataaaatggataacggtactctagaatttacacctatagattcgcataaaggatacgttgtatctagacgtggagatctagaaacacttggatattgtatgattagatggttgggaggtatcttaccatggactaagatatctgaaacaaagaattgtgcattagtaagtgccacaaaacagaaatatgttaacaatactgcgactttgttaatgaccagtttgcaatatgcacctagagaattgctgcaatatattaccatggtaaactctttgacatattttgaggaacccaattacgacaagtttcggcacatattaatgcagggtgtatattattaagtgtggtgtttggtcgataaaaattaaaaaataacttaatttattattgatctcgtgtgtacaaccgaaatcatggcgatgttttacgcacacgctctcggtgggtacgacgagaatcttcatgcctttcctggaatatcatcgactgttgccaatgatgtcaggaaatattctgttgtgtcagtttataataacaagtatgacattgtaaaagacaaatatatgtggtgttacagtcaggtgaacaagagatatattggagcactgctgcctatgtttgagtgcaatgaatatctacaaattggaaatccgatccatgatcaagaaggaaatcaaatctctatcatcacatatcgccacaaaaactactatgctctaagcggaatcgggtacgagagtctagacttgtgtttggaaggagtagggattcatcatcacgtacttgaaacaggaaacgctgtatatggaaaagttcaacatgattattctactatcaaagagaaggccaaagaaatgagtgcacttagtccaggacctatcatcgattaccacgtctggataggagattgtatctgtcaagttactgctgtggacgtacatggaaaggaaattatgaaaatgagattcaaaaagggtgcggtgcttccgatcccaaatctggtaaaagttaaacttggggagaatgatacagaaaatctttcttctactatatcggcggcaccatcgaggtaaccacctctctggaagacagcgtgaatcatgtactcatgaaacgtttggaaactatacgccatatgtggtctgttgtatatgatcattttgatattgtgaatggtaaagaatgctgttatgtgcatacgcattcatctaatcaaaatcctataccgagtactgtaaaaacaaatttgtacatgaagactatgggatcatgcattcaaatggattccatggaagctctagagtatcttagcgaactgaaggaatcaggtggatggagtcccagaccagaaatgcaggaatttgaatatccagatggagtggaagacactgaatcaattgagagattggcagaggagttcttcaatagatcagaacttcaggctggtgaatcagtcaaatttggtaattctattaattgttaaacatacatctgtttcagctaagcaactaagaacacgtatacggcagcagcttccttctatactctcatcttttaccaacacaaagggtggatatttgttcattggagttgataataatacacacaaagtatttggattcacggtgggttacgactacctcagactgatagagaatgatatagaaaagcatatcaaaagacttcgtgttgtgcatttctgtgagaagaaagaggacatcaagtacgcgtgtcgattcatcaaggtatataaacctggggatgagactacctcgacatacgtgtgcgctatcaaagtggaaagatgctgttgtgctgtgtttgcagattggccagaatcatggtatatggatactaatggtatcaagaagtattctccagatgaatgggtgtcacatataaaattttaattaatgtaactatagagaacaaataataaggttgtaatatcatatagacaataactaacaattaattagtaactgttatctcttttttaactaaccaactaactatatacctattaatacatcgtaattatagttcttaacatctattaatcattaattcgcttctttaattttttataaactaacattgttaattgaaaagggataacatgttacagaatataaattatatatggatttttttaaaaaggaaatacttgactggagtatatatttatctcttcattatatagcacgcgtgttttccaatttttccacatcccatataatacaggattataatctcgttcgaacatacgagaaagtggataaaacaatagttgattttttatctaggttgccaaatttattccatattttagaatatggggaaaatattctacatatttattctatggatgatgctaatacgaatattataattttttttctagatagagtattaaatattaataagaacgggtcatttatacacaatctcgggttatcatcatccattaatataaaagaatatgtatatcaattagttaataatgatcatccagataataggataagactaatgcttgaaaatggacgtagaacaagacattttttgtcctatatatcagatacagttaatatctatatatgtattttaataaatcatggattttatatagatgccgaagacagttacggttgtacattattacatagatgtatatatcactataagaaatcagaatcagaatcatacaatgaattaattaagatattgttaaataatggatcagatgtagataaaaaagatacgtacggaaacacaccttttatcctattatgtaaacacgatatcaacaacgtggaattgtttgagatatgtttagagaatgctaatatagactctgtagactttaatagatatacacctcttcattatgtctcatgtcgtaataaatatgattttgtaaagttattaatttctaaaggagcaaatgttaatgcgcgtaataaattcggaactactccattttattgtggaattatacacggtatctcgcttataaaactatatttggaatcagacacagagttagaaatagataatgaacatatagttcgtcatttaataatttttgatgctgttgaatctttagattatctattatccagaggagttattgatattaactatcgtactatatacaacgaaacatctatttacgacgctgtcagttataatgcgtataatacgttggtctatctattaaacaaaaatggtgattttgagacgattactactagtggatgtacatgtatttcggaagcagtcgcaaacaacaacaaaataataatggaagtactattgtctaaacgaccatctttgaaaattatgatacagtctatgatagcaattactaaacataaacagcataatgcagatttattgaaaatgtgtataaaatatactgcgtgtatgaccgattatgatactcttatagatgtacagtcgctacagcaatataaatggtatattttaagatgtttcgatgaaatagatatcatgaagagatgttatataaaaaataaaactgtattccaattagttttttgtatcaaagacattaatactttaatgagatacggtaaacatccttctttcgtgaaatgcactagtctcgacgtatacggaagtcgtgtacgtaatatcatagcatctattagatatcgtcagagattaattagtctattatccaagaagctggatcctggagataaatggtcgtgttttcctaacgaaataaaatataaaatattggaaaactttaacgataacgaactatccacatatctaaaaatcttataaacattattaaaatataaaatctaagtaggataaaatcacactacatcattgtttccttttagtgctcgacagtgtatactatttttaacgctcataaataaaaatgaaaacgatttccgttgttacgttgttatgcgtactacctgctgttgtttattcaacatgtactgtacccactatgaataacgctaaattaacgtctaccgaaacatcgtttaatgataaccagaaagttacgtttacatgtgatcagggatatcattctttggatccaaatgctgtctgtgaaacagataaatggaaatacgaaaatccatgcaaaaaaatgtgcacagtttctgattatgtctctgaactatataataaaccgctatacgaagtgaattccaccatgacactaagttgcaacggcgaaacaaaatattttcgttgcgaagaaaaaaatggaaatacttcttggaatgatactgttacgtgtcctaatgcggaatgtcaacctcttcaattagaacacggatcgtgtcaaccagttaaagaaaaatactcatttggggaatatatgactatcaactgtgatgttggatatgaggttattggtgcttcgtacataagttgtacagctaattcttggaatgttattccatcatgtcaacaaaaatgtgatatgccgtctctatctaacggattaatttccggatctacattttctatcggtggcgttatacatcttagttgtaaaagtggttttacactaacggggtctccatcatccacatgtatcgacggtaaatggaatcccatactcccaatatgtgtacgaactaacgaaaaatttgatccagtggatgatggtcccgacgatgagacagatttgagcaaactctcgaaagacgttgtacaatatgaacaagaaatagaatcgttagaagcaacttatcatataatcatagtggcgttgacaattatgggcgtcatatttttaatctccgttatagtattagtttgttcctgtgacaaaaataatgaccaatataagttccataaattgctaccgtaaatataaatccgttaaaataattaataatttaataacaaacaagtatcaaaagattaaagacttatagctagaatcaattgagatgtcttcttcagtggatgttgatatctacgatgccgttagagcatttttactcaggcactattataacaagagatttattgtgtatggaagaagtaacgccatattacataatatatacaggctatttacaagatgcgccgttataccgttcgatgatatagtacgtactatgccaaatgaatcacgtgttaaacaatgggtgatggatacacttaatggtataatgatgaatgaacgcgatgtttctgtaagcgttggcaccggaatactattcatggaaatgtttttcgattacaataaaaatagtatcaacaatcaactaatgtatgatataattaatagcgtatctataattctagctaatgagagatatagaagcgcttttaacgacgatggtatatacatccgtagaaatatgattaacaagttgtacggatacgcatctctaactactattggcacgatcgctggaggtgtttgttattatctgttgatgcatctagttagtttgtataaataattatttcaatatactagttaaaattttaagattttaaatgtataaaaaactaataacgtttttatttgtaataggtgcattagcatcctattcgaataatgagtacactccgtttaataaactgagtgtaaaactctatatagatggagtagataatatagaaaattcatatactgatgataataatgaattggtgttaaattttaaagagtacacaatttctattattacagagtcatgcgacgtcggatttgattccatagatatagatgttataaacgactataaaattattgatatgtataccattgactcgtctactattcaacgcagaggtcacacgtgtagaatatctaccaaattatcatgccattatgataagtacccttatattcacaaatatgatggtgatgagcgacaatattctattactgcagagggaaaatgctataaaggaataaaatatgaaataagtatgatcaacgatgatactctattgagaaaacatactcttaaaattggatctacttatatatttgatcgtcatggacatagtaatacatattattcaaaatatgatttttaaaaatttaaaatatattatcacttcagtgacagtagtcaaataacaaacaacaccatgagatatattataattctcgcagttttgttcattaatagtatacatgctaaaataactagttataagtttgaatccgtcaattttgattccaaaattgaatggactggggatggtctatacaatatatcccttaaaaattatggcatcaagacgtggcaaacaatgtatacaaatgtaccagaaggaacatacgacatatccgcatttccaaagaatgatttcgtatctttctgggttaaatttgaacaaggcgattataaagtggaagagtattgtacgggactatgcgtcgaagtaaaaattggaccaccgactgtaacattgactgaatacgacgaccatatcaatttgtacatcgagcatccgtatgctactagaggtagcaaaaagattcctatttacaaacgcggtgacatgtgtgatatctacttgttgtatacggctaacttcacattcggagattctaaagaaccagtaccatatgatatcgatgactacgattgcacgtctacaggttgcagcatagactttgtcacaacagaaaaagtgtgcgtgacagcacagggagccacagaagggtttctcgaaaaaattactccatggagttcgaaagtatgtctgacacctaaaaagagtgtatatacatgcgcaattagatccaaagaagatgttcccaatttcaaggacaaaatggccagagttatcaagagaaaatttaatacacagtctcaatcttatttaactaaatttctcggtagcacatcaaatgatgttaccacttttcttagcatgcttaacttgactaaatattcataactaatttttattaatgatacaaaaacgaaataaaactgcatattatacactggttaacgcccttataggctctaaccattttcaagatgaggtccctgattatagtccttctgttcccctctatcatctactccatgtctattagacgatgtgagaagactgaagaggaaacatggggattgaaaatagggttgtgtataattgccaaagatttctatcccgaaagaactgattgcagtgttcatctcccaactgcaagtgaaggattgataactgaaggcaatggattcagggatatacgaaacaccgataaattataaaaaaagcaatgtgtccgctgtttccgttaataatactattttcgtaactggcggattattcataaataactctaatagcacgatcgtggttaacaatatggaaaaacttgacatttataaagacaaacaatggtcgattatagaaatgcctatggctagggtatatcacggcattgactcgacatttggaatgttatattttgccggaggtctatccgttaccgaacaatatggtaatttagagaaaaacaacgagatatcttgttacaatcctagaacgaataagtggtttgatatttcatatactatttataagatatccatatcatcattgtgtaaactaaataacgtcttctatgtatttagtaaggacattggatatgtggaaaagtatgatggtgcatggaagttagtacatgatcgtctccccgctataaaggcattatcaacttctccttattgattgaaaatgaaaatataaatagtttttatgtatagcagtattaccctatagttttattgcttactactaacatggatacagatgttacaaatgtagaagatatcataaatgaaatagatagagagaaagaagaaatactaaaaaatgtagaaattgaaaataataaaaacattaacaagaatcatcccaatgaatatattagagaagcactcgttattaataccagtagtaatagtgattccattgataaagaagttatagaatgtatcagtcacgatgtaggaatatagatcatatctactaatttttataatcgatacaaaacataaaaaacaactcgttattacatagcaggcatggaatccttcaagtattgttttgataacgatggcaagaaatggattatcggaaatactttatattctggtaattcaatactctataaggtcagaaaaaatttcactagttcgttctacaattacgtaatgaagatagatcacaaatcacacaagccattgttgtctgaaatacgattctatatatctgtattggatcctttgactatcgacaactggacacgggaacgtggtataaagtatttggctattccagatctgtatggaattggagaaaccgatgattatatgttcttcgttataaagaattcgggaagagtattcgccccaaaggatactgaatcagtcttcgaagcatgcgtcactatgataaacacgttagagtttatacactctcgaggatttacccatggaaaaatagaaccgaggaatatactgattagaaataaacgtctttcactaattgactattctagaactaacaaactatacaagagtggaaactcacatatagattacaacgaggacatgataacttcaggaaatatcaattatatgtgtgtagacaatcatcttggagcaacagtttcaagacgaggagatttagaaatgttgggatattgcatgatagaatggttcggtggcaaacttccatggaaaaacgaaagtagtataaaagtaataaaacaaaaaaaagaatataaaaaatttatagctactttctttgaggactgttttcctgaaggaaatgaacctctggaattagttagatatatagaattagtatacacgttagattattctcaaactcctaattatgacagactacgtaaactgtttatacaagattgaaattatattcttttttttatagagtgtggtagtgttacggatatctaatattaatattagactatctctatcgcgctacacgaccaatatcgattactatggatatcttctatgaaaggagagaatgtatttatttctccagcgtcaatctcgtcagtattgacaatactgtattatggagctaatggatccactgctgaacagctatcaaaatatgtagaaacggaggagaacacggataaggttagcgctcagaatatctcattcaaatccatgaataaagtatatgggcgatattctgccgtgtttaaagattcctttttgagaaaaattggcgataagtttcaaactgttgacttcactgattgtcgcactatagatgcaatcaacaagtgtgtagatatctttactgaggggaaaatcaatccactattggatgaaccattgtctcctagcaattagtgccgtatactttaaagcaaaatggttgacgccattcgaaaaggaatttaccagtgattatcccttttacgtatctccgacggaaatggtagacgtaagtatgatgtctatgtacggcaaggcatttaatcacgcatctgtaaaagaatcattcggcaacttttcaatcatagaactgccatatgttggagatactagtatgatggtcattcttccagacaagattgatggattagaatccatagaacaaaatctaacagatacaaattttaagaaatggtgtgactttatggatgctatgtttatagatgttcacattcccaagtttaaggtaacaggctcgtataatctggtggatactctagtaaagtcaggactgacagaggtgttcggttcaactggagattatagcaatatgtgtaatttagatgtgagtgtcgacgctatgatccacaaaacgtatatagatgtcaatgaagagtatacagaagcagctgcagcaacttctgtactagtggcagactgtgcatcaacaattacaaatgagttctgtgcagatcatccgttcatctatgtgattaggcatgttgatggaaaaattcttttcgttggtagatattgctctccgacaactaattgttaaccattttttttaaaaaaaatagaaaaaacatgtggtattagtgcaggtcgttgttcttccaattgcaattggtaagatgacggccaactttagtacccacgtcttttcaccacagcactgtggatgtgacagactgaccagtattgatgacgtcaaacaatgtttgactgaatatatttattggtcgtcctatgcataccgcaacaggcaatgcgctggacaattgtattccacactcctctcttttagagatgatgcggaattagtgttcatcgacattcgcgagctggtaaaaaatatgccgtgggatgatgtcaaagattgtacagaaatcatccgttgttatataccggatgagcaaaaaaccatcagagagatttcggccatcatcggactttgtgcatatgctgctacttactggggaggtgaagaccatcccactagtaacagtctgaacgcattgtttgtgatgcttgagatgctaaattacgtggattataacatcatattccggcgtatgaattgatgagttgtacatcttgacattttctttcttctcttctccctttcttctcttctcccttcctccctcttctccctttcccagaaacaaacttttttacccactataaaataaaatgagtatactacctattatatttcttcctatatttttttattcttcattcgttcagacttttaacgcgtctgaatgtatcgacaaagggcaatattttgcatcattcatggagttagaaaacgagccagtaatcttaccatgtcctcaaataaatacgctatcatccggatataatatattagatattttatgggaaaaacgaggagcggataatgatagaattataccgatagataatggtagcaatatgctaattctgaacccgacacaatcagactctggtatttatatatgcattaccacgaacgaaacctactgtgacatgatgtcgttaaatttgacaatcgtgtctgtctcagaatcaaatatagatcttatctcgtatccacaaatagtaaatgagagatctactggcgaaatggtatgtcccaatattaatgcatttattgctagtaacgtaaacgcagatattatatggagcggacatcgacgccttagaaataagagacttaaacaacggacacctggaattattaccatagaagatgttagaaaaaatgatgctggttattatacatgtgttttagaatatatatacggtggcaaaacatataacgtaaccagaattgtaaaattagaggtacgggatagaataataccttctactatgcaattaccagatggcattgtaacttcaataggtagtaatttgactattgcatgcagagtatcgttgagacctcccacaacggacaccgacgtcttttggataagtaatggtatgtattacgaagaagatgatggggacggaaacggtagaataagtgtagcaaataaaatctatatgaccgataagagacgtgttattacatcccggttaaacattaatcctgtcaaggaagaagatgctacaacgtttacgtgtatggcgtttactattcctagcatcagcaaaacagttactgttagtataacgtgaatgtatgttgttacatttccatgtcaattgagtttataagaatttttatacattatcttccaacaaacaattgacgaacgtattgctatgattaactcccacgatactatgcatattattaatcattaacttgcagactatacctagtgctattttgacatactcgtgttcttgtgtaattgcggtatctatattattaaagtacgtaaatctagctatagttttattatttaattttagataatataccgtctccttatttttaaaaattgccacatcctttattaaatcatgaatgggaatttctatgtcatcgttagtatattgtgaacaacaagagcagatatctataggaaagggtggaatgcgatacattgatctatgtagttttaaaacacacgcgaactttgaagaatttatataaatcattccatcgatacatccttctatgttgacatgtatatatccaggaattcttttattaatgtcaggaaatgtataaactaaaacattgcccgaaagcggtgcctctatctgcgttatatccgttcttaacttacaaaatgtaaccaatacctttgcatgacttgttttgttcggcaacgttagtttaaacttgacgaatggattaattacaatagcatgatccgcgcatctattaagtttttttactttaacgcccttgtatgtttttacagagactttatctaaatttctagtgcttgtatgtgttataaatataacgggatatagaaccgaatcacctaccttagatacccaattacattttatcagatccagataataaacaaattttgtcgccctaactaattctatattgttatatattttacaattggttatgatatcatgtaataacttggagtctaacgcgcatcgtcgtacgtttatacaattgtgatttagtgtagtatatctacacatgtatttttccgcactatagtattctggactagtgataaaactatcgttatatctgtcttcaatgaactcatcgagatattgctctctgtcatattcatacacctgcataaactttctagacatcttacaatccgtgttattttaggatcatatttacatatttacgggtatatcaaagatgttagattagttaatgggaatcgtctataataatgaatattaaacaattatatgaggacttttaccacaaagcatcataaaaatgagtcgtcgtctgatttatgttttaaatatcaaccgcaaatcaactcataaaatacaagagaatgaaatatatacatattttagtcattgcaatatagaccatacttctacagaacttgattttgtagttaaaaactatgatctaaacagacgacaacctgtaactgggtatactgcactacactgctatttgtataataattactttacaaacgatgtactgaagatattattaaatcatgacgtaaatgtaacgatgaaaaccagtagcggacgtatgcctgtttatatattgcttactagatgttgtaatatttcacatgatgtagtgatagatatgatagacaaagataaaaaccacttattacatagagactattccaacctattactagagtatataaaatctcgttacatgttattgaaggaagaggatatcgatgagaacatagtatccactttattagataagggaatcgatcctaactttaaacaagacggatatacagcgttacattattattatttgtgtctcgcacacgtttataaactaggtgagtgtagaaaaccgataacgataaaaaaggccaagcgaattatttctttgtttatacaacatggagctaatctaaacgcgttagataattgtggtaatacaccattccatttgtatcttagtattgaaatgtgtaataatattcatatgactaaaatgctgttgacttttaatccgaatttcaaaatatgtaataatcatggattaacgcctatactatgttatataacttccgactacatacaacacgatattcttgttatgttaatacatcactatgaaacaaatgttggagaaatgccgatagatgagcgtcgtatgatcgtattcgagtttatcaaaacatattctacacgtccggcagattcgataacttatttgatgaataggtttaaaaatataaatatttatacccgctatgaaggaaagacattattacacgtagcatgtgaatataataatacacaagtaatagattatcttatacgtatcaacggagatataaatgcgttaaccgacaataacaaacacgctacacaactcattatagataacaaagaaaattccccatataccattaattgtttactgtatatacttagatatattgtagataagaatgtgataagatcgttggtggatcaacttccatctctacctatcttcgatataaaatcatttgagaaattcatatcctactgtatacttttagatgacacattttacgataggcacgttaagaatcgcgattctaaaacgtatcgatacgcattttcaaaatacatgtcgtttgataaatacgatggtataataactaaatgtcacgacgaaacaatgttactcaaactgtccactgttctagacactacactatatgcagttttaagatgtcataattcgagaaagttaagaagatacctcaacgagttaaaaaaatataataacgataagtcctttaaaatatattctaatattatgaatgagagataccttaatgtatattataaagatatgtacgtgtcaaaggtatatgataaactatttcctgttttcacagataaaaattgtctactaacattactaccttcagaaattatatacgaaatattatacatgctgacaattaacgatctttataatatatcgtatccacctaccaaagtatagttgtatttttctcatgcgatgtgtgtaaaaaaactgatattatataaatattttagtgccgtataataaagatgacgatgaaaatgatggtacatatatatttcgtatcattattgttattgctattccacagttacgccatagacatcgaaaatgaaatcacagaattcttcaataaaatgagagatactctaccagctaaagactctaaatggttgaatccagcatgtatgttcggaggcacaatgaatgatatagccgctctaggagagccattcagcgcaaagtgtcctcctattgaagacagtcttttatcgcacagatataaagactatgtggttaaatgggagaggctagaaaagaatagacggcgacaggtttctaataaacgtgttaaacatggtgatttatggatagccaactatacatctaaattcagtaaccgtaggtatttgtgcaccgtaactacaaagaatggtgactgtgttcagggtatagttagatctcatattaaaaaacctccttcatgcattccaaaaacatatgaactaggtactcatgataagtatggcatagacttatactgtggaattctttacgcaaaacattataataatataacttggtataaagataataaggaaattaatatcgacgacattaagtattcacaaacgggaaaggaattaattattcataatccagagttagaagatagcggaagatacgactgttacgttcattacgacgacgttagaatcaagaatgatatcgtagtatcaagatgtaaaatacttacggttataccgtcacaagaccacaggtttaaactaatactagatccgaaaatcaacgtaacgataggagaacctgccaatataacatgcactgctgtgtcaacgtcattattgatcgacgatgtactgattgaatgggaaaatccatccggatggcttataggattcgattttgatgtatactctgttttaactagtagaggcggtatcaccgaggcgaccttgtactttgaaaatgttactgaagaatatataggtaatacatataaatgtcgtggacacaactattattttgaaaaaacccttacaactacagtagtattggagtaaatatacaatgcatttttatatacattactgaattattattactgaattattattactgaattattattaattatatcgtatttgtgctatagaatggatgaagatacgcgactatctaggtatttgtatctcaccgatagagaacatataaatgtagactctattaaacagttgtgtaaaatatcagatcctaatgcatgttatagatgtggatgtacggctttacatgagtacttttataattatagatcagtcaacggaaaatacaagtatagatacaacggttactatcaatattattcatctagcgattatgaaaattataatgaatattattatgatagaactggtatgaacagtgagagtgataatatatcaatcaaaacagaatatgaattctatgatgaaacacaagatcaaagtacacaactagtaggttacgacattaaactcaaaaccaatgaggatgattttatggctatgatagatcagtgggtgtccatgattatatagatgaatcaattaataaagtagtatatggaagagagtctcacgtaagatggcgggatatatggcaagaacataatgatggcgtatacagtataggaaaggagtgcatagataatatatacgaagacaaccataccgtagacgaattctacaagatagacagcgtatcagatgtagatgacgcggaacacatatctccgataactaaaaaaccatagaatcagttgatgataatacctacatttctaatcttccgtataccatcaaatacaaaatattcgagcaacaataagtattttttatacctttaaaactgataaataaattttttctagtgatattttggcaagatgagaatcctatttctcatcgctttcatgtatgggtgtgttcactcatatgttaacgcggttgaaaccaaatgtccaaatctagacattgtaacatcttctggagaatttcattgttcaggatgtgtggaacatatgcctgagtttagctatatgtattggttggcaaaggatatgaaatcggacgaggataccaagtttatagaacatctgggtgatggcatcaaagaagatgaaaccgttcgtaccacagatagtggaatcgtcactctacgtaaagtccttcatgtgactgatactaataaatttgataattataggttcacttgtgtcctcgctacgctagatggcatttataaaaagaatgtttgctgaagtagttgtgtgctactatttttatttatgatataatctaatggaattaatttgaattgatatttatccaatactaaagattatattagaatcaaattaatcttttatacgagaaaaaataacgacatacgtcgtcaacaaattaaactttttatttattagttaactagcttatagaacttgctcattgttatgtttctaaaacgggtacggcatataggacaattatccgacgcaccggtttctcttcgtgttctatgccatatattgatgcatgttatgcaaaatatatgagtacacgaatccaataaaccaaagtatctatcgttttgagtaaacaacttcatagcaaattccacattctttttctttacttactctatacacgtcctcgtatttatttagtattttgatgatatccaactcagaaatggttgttgtattattgggtgtatttggagtataggtattattagctatgtaccaatttaccaaccctcttaatattgattgataatcacatcggttatccaattaataactaaattgtagtgtatatatagaccatatatgtttctatttttttgacagttacgtatagtttcagtaagttttgattgttgtattcctgtatctctagataagttagtcatatagtcccttccggcgatacgttttttccaagcccgaaattgattagccaaatgtgtatttatttttgtgatattgatataatatttcggataatgcatactgttagtcttatatcatttggttcatctatgtattgtaatattgttacatgatctatagatgatgtattgattttggcaggatcgaattccatatccgcgactaaacagtgaaaaaaatgtaaatactttttaaattttaaattagtaaaacttttttttattttttatgattccaaaaatactgaatacaaagtcctaaattataaatatggagatcatactaccacaacttattattatgtatacaaggccggtgtaatagatagatatatataattctattacaccggcagacaattaccgaccggtatttgtcgttaccaacataccgtataatatgtaatatacaattccataacccattgacagttgttatacatcaaaattgcaattcttttgattacgatgttataagaatgtagttaattgatgtatgatgttaatgtgtcctctttcctcttataacatcgtaatcaaaaacttttttataatatatacctaataatgtgtcttaatagttctcgtgattcgtcaaacaatcattcttataaaatataataaagcaacgtaaaaacacataaaaataagcgtaactaataagacaatggatatttacgacgataaaggtctacagactattaaactgtttaataatgaatttgattgtataaggaatgacatcagagaattatttaaacatgtaactgattccgatagtatacaacttccgatggaagacaattctgatattatagaaaatatcagaaaaatactatatagacgattaaaaaatgtagaatgtgttgacatcgataacacaataacttttatgaaatacgatccaaatgatgataataagcgtacgtgttctaattgggtacccttaactaataactatatggaatattgtctagtaatatatttggaaacaccgatatgtggaggcaaaataaaattataccaccctacaggaaatataaagtcggataaggatattatgtttgcaaagactctagactttaaatcaacgaaagtgttaactggacgtaaaacaattgccgttctagacatatccgtttcatataatagatcaatgactactattcactacaacgacgacgttgatatagatatacatactgataaaaatggaaaagagttatgttattgttatataacaatagatgatcattacttggttgatgtggaaactataggagttatagtcaatagatctggaaaatgtctgttagtaaataaccatctaggtataggtatcgttaaagataaacgtataagcgatagttttggagatgtatgtatggatacaatatttgacttttctgaagcacgagagttattttcattaactaatgatgataacaggaatatagcatgggacactgataaactagacgatgatacagatatatggactcccgtcacagaagatgattacaaatttctttctagactagtattgtatgcaaaatctcaatcggatactgtatttgactattatgttcttactggtgatacggaaccacccactgtattcattttcaaggtaactagattttactttaatatgccgaaataaaaaatttttgtataatatctagaggtagaggtattgtttagataaatacaaataacatagatacatcgcatacttagcatttttataaatatacataagacatacactttatacatttttgtaaaaatactcataaaaaaatttataaaaattatggcacaaccatatcttgtataggtagtttagttcgtcgagtgaacctataaacagataatagacaacacataataatgcctactaatacaagcataataccgggagatgggatatatgacgttgtagtgtttgggttttctgaacgttgatagtctactaatactacatgctgacatctaatgcctgtataaccatgagagcatctacaatacataccgtcaatatctctagcgtggatacagtcaccgtgtaaacaatatccatctccctctggaccgcataatctgatagctggaatatctgttgtagcgtttgtaatttctggcaatgtcgtttcgatagcgttaccactatcggcgaatgatctgattatcatagcagcgaacaacaacatcagataatttatcaacatttttgatggattctgtgtttatgctgtttctcagtgtgtgtttatgacaagattgggaattttatattattaattcagtaatataaactaataatatattgttaattgtgtaaataatataaaaataacaatacaatattgaatgtgttgctgttaaaaatgtatgtgttaatataatagaataaaataaatgagtatgatcattttagataacgattgattttatcattaccgcttcattcttatattctttgcttacggaacctatatttagaaacatctactaacaattttttatgcttgcattattaatggtatgtaatatgattgattgtgtacgcaataccaatttgttaagtatgaatacggggtacaaacataaattgaaatttaacattatttatttatgatatatatcgttatcgttaggtctataccatggatatctttaaagaactaatcttaaaacaccctgatgaaaatgttttgatttctccagtttccattttatctactttatctattctaaatcatggagcagctggttctacagctgaacaactatcaaaatatatagagaatatgaatgagaatacacccgatgacaataatgatgacatggaggtagatattccgtattgtgcgacactagctaccgcaaataaaatatacggtagcgatagtatcgagttccacgcctccttcctacaaaaaataaaagacgattttcaaactgtaaactttaataatgctaaccaaacaaaggaactaatcaacgaatgggttaagacaatgacaaatggtaaaattaattccttattgactagtccgctatccattaatactcgtatgacagttgttagcgccgtccattttaaagcaatgtggaaatatccattttctaaacatcttacatatacagacaagttttatatttctaagaatatagttaccagcgttgatatgatggtgggtaccgagaataacttgcaatatgtacatattaatgaattattcggaggattctctattatcgatattccatacgagggaaactctagtatggtaattatactaccggacgacatagaaggtatatataacatagaaaaaaatataacagatgaaaaatttaaaaaatggtgtggtatgttatctactaaaagtatagacttgtatatgccaaagtttaaagtggaaatgacagaaccgtataatctggtaccgattttagaaaatttaggacttactaatatattcggatattatgcagattttagcaagatgtgtaatgaaactatcactgtagaaaaatttctacatacgacgtttatagatgttaatgaggagtatacagaagcatcggccgttacaggagtatttacgattaacttttcgatggtatatcgtacgaaggtctacataaaccatccattcatgtacatgattaaagacaccacaggacgtatactttttatagggaaatactgctatccgcaataaatataaacaaatagacttttataaagagtcttcaacgataagtatatcgacatactacttatgctgcgaaagattctgaacgagaacgactatctcaccctcttggatcatatccgcactgctaaatactaaatctccactacactttttatcatcttatgaggaatgattgccttcgtgaaataggaataattagcaccagaatagctatggattattgtggtagagagtgcactattctatgtcgtctactggatgaagatgtgacgtacaaaaaaataaaactagaaattgaaacgtgtcacaacttatcaaaacatatagatagacgaggaaacaatgcgctacattgttacgtctccaataaatgcgatacagacattaagattgttctctcgcggagtcgagagactttgtagaaacaacgaaggattaactccgctaggagtatacagtaagcatagatacgtaaaatctcagattgtgcatctactgatatccagctattcaaattcctctaacgaactcaagtcgaatataaatgatttcgatctgtattcggataatatcgacttacgtctgctaaaatacctaattgtggataaacggatacgtccgtccaagaatacgaattatgcaatcaatggtctcggattggtggatatatacgtaacgacgcctaatccgagaccagaagtattgctatggcttcttaaatcagaatgttacagcaccggttacgtatttcgtacctgtatgtacgacagtgatatgtgtaagaactctcttcattactatatatcgtctcatagagaatctcaatctctatccaaggatgtaattaaatgtttgatcgataacaatgtttccatccatggcagagacgaaggaggatctttacccatccaatactactggtctttctcaaccatagatatagagattgttaaattattattaataaaggatgtggacacgtgtagagtatacgacgtcagccctatattagaggcgtattatctaaacaagcgatttagagtaaccccatataatgtagacatggaaatcgttaatcttcttattgagagacgtcatactcttgtcgacgtaatgcgtagtattacttcgtacgattccagagaatataaccactacatcatcgataacattctaaagagatttagacaacaggatgaatccatcgtacaagccatactgataaactacttacattacggcgatatggtcgttcgatgcatgttagataacggacaacaactatcctctacacgactactttgttaataataatctcgtcgatgtaaacgtcgtaaggtttatcgtggaaaatatggacacgcggctgtaaatcacgtatcgaacaatggccgtctatgtatgtacggtctgatattatcgagatttaataattgcgggtatcactgttatgaaaccatactgatagatgtatttgatatactaagcaagtacatggatgatatagatatgatcgataactctactatattacgcggtcgatgtcaataatatacaatttgcaaagcggttattggaatatggagcgagtatcacgctcgataatcaatacggccatccagaaaagcagttacagaagagaaaacaaaacgaaatcgttgttctacaagatgtctctccctacgacgattactacgtaaaaaagatactagcctactgcctattaagggacgagtcattcgcggaactacatagtaaattctgtttaaacgaggactataaaagtgtatttatgaaaaatatatcattcgataagatagattccatcatcgtgacataagtcgcctcaaagagattcgaatctccgacaccgacctgtatacggtatcacagctatcttaaagccatacattcagacagtcacatttcatttcccatgtacgacgatctcatagaacagtgccatctatcgatggagcgtaaaagtaaactcgtcgacaaagcactcaataaattagagtctaccatcggtcaatctagactatcgtatttgcctccggaaattatgcgcaatatcatctaaacagtatgttgtacggaaagaaccattacaaatattatccatgatagaaagaaaatatctatatgattggagaagtaggaaacaggaacaagacaacgattactacattattaaatcatgaagtccgtattatactcgtatatattgtttctctcatgtataataataaacggaagagatatagcaccgcatgcaccatccgatggaaagtgtaaagacaacgaatacaaacgccataatttgtgtccgggaacatacgcttccagattatgcgatagcaagactaacacacgatgtacgccgtgtggttcgggtaccttcacatctcgcaataatcatttacccgcttgtctaagttgtaacggaagacgcgatcgtgtaacacgactcacaatagaatctgtgaatgctctcccggatattattgtcttctcaaaggatcatccggatgcaaggcatgtgtttcccaaacaaaatgtggaataggatacggagtatccggagacgtcatctgttctccgtgtggtctcggaacatattctcacaccgtctcttccgcagataaatgcgaacccgtacccagaaatacgtttaactatatcgatgtggaaattaacctgtatccagttaacgacacgtcgtgtactcggacgaccactaccggtctcagcgaatccatctcaacgtcggaactaactattactatgaatcataaagactgtaatcccgtatttcgtgatggatacttctccgttcttaataaggtagcgacttcaggtttctttacaggagaaaggtgtgcactctgaatttcgagattaaatgcaataacaaagattcttcctccaaacagttaacgaaagcaaagaatgatactatcatgccgcattcggagacagtaactctagtgggcgacatctatatactatatagtaataccaatactcaagactacgaaactgatacaatctcttatcatgtgggtaatgttctcgatgtcgatagccatatgcccggtagttgcgatatacataaactgatcactaattccaaacccacccactttttatagtaagtttttcacccataaataataaatacaataattaatttctcgtaaaagtagaaaatatattctaatttattgcacggtaaggaagtagaatcataaagaacagtactcaatcaatagcaattatgaaacaatatatcgtcctggcatgcatgtgcctggcggcagctgctatgcctgccagtcttcagcaatcatcctcatcctcctcctcgtgtacggaagaagaaaacaaacatcatatgggaatcgatgttattatcaaagtcacaaagcaagaccaaacaccgaccaatgataagatttgccaatccgtaacggaaattacagagtccgagtcagatccagatcccgaggtggaatcagaagatgattccacatcagtcgaggatgtagatcctcctaccacttattactccatcatcggtggaggtctgagaatgaactttggattcaccaaatgtcctcagattaaatccatctcagaatccgctgatggaaacacagtgaatgctagattgtccagcgtgtccccaggacaaggtaaggactctcccgcgatcactcatgaagaagctcttgctatgatcaaagactgtgaagtgtctatcgacatcagatgtagcgaagaagagaaagacagcgacatcaagacccatccagtactcgggtctaacatctctcataagaaagtgagttacgaagatatcatcggttcaacgatcgtcgatacaaaatgcgtcaagaatctagagtttagcgttcgtatcggagacatgtgcaaggaatcatctgaacttgaggtcaaggatggattcaagtatgtcgacggatcggcatctgaaggtgcaaccgatgatacttcactcatcgattcaacaaaactcaaagcgtgtgtctgaatcgataactctattcatctgaaattggatgagtagggttaatcgaacgattcaggcacaccacgaattaaaaaagtgtaccggacactatattccggtttgcaaaacaaaaatgttcttaactacattcacaaaaagttacctctcgcgacttcttctttttctgtctcaatagtgtgatacgattatgacactattcctattcctattcctatttcctttcagagtatcacaaaaatattaaacctctttctgatggtctcataaaaaaagttttacaaaaatatttttattctctttctctctttgatggtctcataaaaaaagttttacaaaaatatttttattctctttctctctttgatggtctcataaaaaaagttttacaaaaatatttttattctctttctctctttgatggtctcataaaaaaagttttacaaaaatatttttattctctttctctctttgatggtctcataaaaaaagttttacaaaaatatttttattctctttctctctttgatggtctcataaaaaaagttttacaaaaatatttttattctctttctctctttgatggtctcataaaaaaagttttacaaaaatatttttattctctttctctctttgatggtctcataaaaaaagttttacaaaaatatttttattctctttctctctttgatggtctcataaaaaaagttttacaaaaatatttttattctctttctctctttgatggtctcataaaaaaagttttacaaaaatatttttattctctttctctctttgatggtctcataaaaaaagttttacaaaaatatttttattctctttctctctttgatggtctcataaaaaaagttttacaaaaatatttttattctctttctctctttgatggtctcataaaaaagttttacaaaaatatttttattctctttctctctttgatggtctcataaaaaagttttacaaaaatatttttattctctttctctctttgatggtctcataaaaaaagttttacaaaaatatttttattctctttctctctttgatggtctcataa

SEQ ID NO: 20 - DNA, 201471 bp, Artificial Sequence
  GLV-1h189
ttatgagaccatcaaagagagaaagagaataaaaatatttttgtaaaactttttttatgagaccatcaaagagagaaagagaataaaaatatttttgtaaaacttttttatgagaccatcaaagagagaaagagaataaaaatatttttgtaaaacttttttatgagaccatcaaagagagaaagagaataaaaatatttttgtaaaactttttttatgagaccatcaaagagagaaagagaataaaaatatttttgtaaaactttttttatgagaccatcaaagagagaaagagaataaaaatatttttgtaaaactttttttatgagaccatcaaagagagaaagagaataaaaatatttttgtaaaactttttttatgagaccatcaaagagagaaagagaataaaaatatttttgtaaaactttttttatgagaccatcaaagagagaaagagaataaaaatatttttgtaaaactttttttatgagaccatcaaagagagaaagagaataaaaatatttttgtaaaactttttttatgagaccatcaaagagagaaagagaataaaaatatttttgtaaaactttttttatgagaccatcaaagagagaaagagaataaaaatatttttgtaaaactttttttatgagaccatcaaagagagaaagagaataaaaatatttttgtaaaactttttttatgagaccatcaaagagagaaagagaataaaaatatttttgtaaaactttttttatgagaccatcaaagagagaaagagaataaaaatatttttgtaaaactttttttatgagaccatcagaaagaggtttaatatttttgtgatactctgaaaggaaataggaataggaataggaatagtgtcataatcgtatcacactattgagacagaaaaagaagaagtcgcgagaggtaactttttgtgaatgtagttaagaacatttttgttttgcaaaccggaatatagtgtccggtacacttttttaattcgtggtgtgcctgaatcgttcgattaaccctactcatccaatttcagatgaatagagttatcgattcagacacacgctttgagttttgttgaatcgatgagtgaagtatcatcggttgcaccttcagatgccgatccgtcgacatacttgaatccatccttgacctcaagttcagatgattccttgcacatgtctccgatacgaacgctaaactctagattcttgacgcattttgtatcgacgatcgttgaaccgatgatatcttcgtaactcactttcttatgagagatgttagacccgagtactggatgggtcttgatgtcgctgtctttctcttcttcgctacatctgatgtcgatagacacttcacagtctttgatcatagcaagagcttcttcatgagtgatcgcgggagagtccttaccttgtcctggggacacgctggacaatctagcattcactgtgtttccatcagcggattctgagatggatttaatctgaggacatttggtgaatccaaagttcattctcagacctccaccgatgatggagtaataagtggtaggaggatctacatcctcgactgatgtggaatcatcttctgattccacctcgggatctggatctgactcggactctgtaatttccgttacggattggcaaatcttatcattggtcggtgtttggtcttgctttgtgactttgataataacatcgattcccatatgatgtttgttttcttcttccgtacacgaggaggaggatgaggatgattgctgaagactggcaggcatagcagctgccgccaggcacatgcatgccaggacgatatattgtttcataattgctattgattgagtactgttctttatgattctacttccttaccgtgcaataaattagaatatattttctacttttacgagaaattaattattgtatttattatttatgggtgaaaaacttactataaaaagtgggtgggtttggaattagtgatcagtttatgtatatcgcaactaccgggcatatggctatcgacatcgagaacattacccacatgataagagattgtatcagtttcgtagtcttgagtattggtattactatatagtatatagatgtcgcccactagagttactgtctccgaatgcggcatgatagtatcattctttgctttcgttaactgtttggaggaagaatctttgttattgcatttaatctcgaaattcagagtgcacacctttctcctgtaaagaaacctgaagtcgctaccttattaagaacggagaagtatccatcacgaaatacgggattacagtctttatgattcatagtaatagttagttccgacgttgagatggattcgctgagaccggtagtggtcgtccgagtacacgacgtgtcgttaactggatacaggttaatttccacatcgatatagttaaacgtatttctgggtacgggttcgcatttatctgcggaagagacggtgtgagaatatgttccgagaccacacggagaacagatgacgtctccggatactccgtatcctattccacattttgtttgggaaacacatgccttgcatccggatgatcctttgagaagacaataatatccgggagagcattcacagattctattgtgagtcgtgttacacgatcgcgtcttccgttacaacttagacaagcgggtaaatgattattgcgagatgtgaaggtacccgaaccacacggcgtacatcgtgtgttagtcttgctatcgcataatctggaagcgtatgttcccggacacaaattatggcgtttgtattcgttgtctttacactttccatcggatggtgcatgcggtgctatatctcttccgtttattattatacatgagagaaacaatatatacgagtataatacggacttcatgatttaataatgtagtaatcgttgtcttgttcctgtttcctacttctccaatcatatagatattttctttctatcatggataatatttgtaatggttctttccgtacaacatactgtttagatgatattgcgcataatttccggaggcaaatacgatagtctagattgaccgatggtagactctaatttattgagtgctttgtcgacgagtttacttttacgctccatcgatagatggcactgttctatgagatcgtcgtacatgggaaatgaaatgtgactgtctgaatgtatggctttaagatagctgtgataccgtatacaggtcggtgtcggagattcgaatctctttgaggcgacttatgtcacgatgatggaatctatcttatcgaatgatatatttttcataaatacacttttatagtcctcgtttaaacagaatttactatgtagttccgcgaatgactcgtcccttaataggcagtaggctagtatcttttttacgtagtaatcgtcgtagggagagacatcttgtagaacaacgatttcgttttgttttctcttctgtaactgcttttctggatggccgtattgattatcgagcgtgatactcgctccatattccaataaccgctttgcaaattgtatattattgacatcgaccgcgtaatatagtagagttatcgatcatatctatatcatccatgtacttgcttagtatatcaaatacatctatcagtatggtttcataacagtgatacccgcaattattaaatctcgataatatcagaccgtacatacatagacggccattgttcgatacgtgatttacagccgcgtgtccatattttccacgataaaccttacgacgtttacatcgacgagattattattaacaaagtagtcgtgtagaggatagttgttgtccgttatctaacatgcatcgaacgaccatatcgccgtaatgtaagtagtttatcagtatggcttgtacgatggattcatcctgttgtctaaatctctttagaatgttatcgatgatgtagtggttatattctctggaatcgtacgaagtaatactacgcattacgtcgacaagagtatgacgtctctcaataagaagattaacgatttccatgtctacattatatggggttactctaaatcgcttgtttagataatacgcctctaatatagggctgacgtcgtatactctacacgtgtccacatcctttattaataataatttaacaatctctatatctatggttgagaaagaccagtagtattggatgggtaaagatcctccttcgtctctgccatggatggaaacattgttatcgatcaaacatttaattacatccttggatagagattgagattctctatgagacgatatatagtaatgaagagagttcttacacatatcactgtcgtacatacaggtacgaaatacgtaaccggtgctgtaacattctgatttaagaagccatagcaatacttctggtctcggattaggcgtcgttacgtatatatccaccaatccgagaccattgattgcataattcgtattcttggacggacgtatccgtttatccacaattaggtattttagcagacgtaagtcgatattatccgaatacagatcgaaatcatttatattcgacttgagttcgttagaggaatttgaatagctggatatcagtagatgcacaatctgagattttacgtatctatgcttactgtatactcctagcggagttaatccttcgttgtttctacaaagtctctcgactccgcgagagaacaatcttaatgtctgtatcgcatttattggagacgtaacaatgtagcgcattgtttcctcgtctatctatatgttttgataagttgtgacacgtttcaatttctagttttatttttttgtacgtcacatcttcatccagtagacgacatagaatagtgcactctctaccacaataatccatagctattctggtgctaattattcctatttcacgaaggcaatcattcctcataagatgataaaaagtgtagtggagatttagtatttagcagtgcggatatgatccaagagggtgagatagtcgttctcgttcagaatctttcgcagcataagtagtatgtcgatatacttatcgttgaagactctttataaaagtctatttgtttatatttattgcggatagcagtatttccctataaaaagtatacgtcctgtggtgtctttaatcatgtacatgaatggatggtttatgtagaccttcgtacgatataccatcgaaaagttaatcgtaaatactcctgtaacggccgatgcttctgtatactcctcattaacatctataaacgtcgtatgtagaaatttttctacagtgatagtttcattacacatcttgctaaaatctgcataatatccgaatatattagtaagtcctaaattttctaaaatcggtaccagattatacggttctgtcatttccactttaaactttggcatatacaagtctatacttttagtagataacataccacaccattttttaaatttttcatctgttatatttttttctatgttatatataccttctatgtcgtccggtagtataattaccatactagagtttccctcgtatggaatatcgataatagagaatcctccgaataattcattaatatgtacatattgcaagttattctcggtacccaccatcatatcaacgctggtaactatattcttagaaatataaaacttgtctgtatatgtaagatgtttagaaaatggatatttccacattgctttaaaatggacggcgctaacaactgtcatacgagtattaatggatagcggactagtcaataaggaattaattttaccatttgtcattgtcttaacccattcgttgattagttcctttgtttggttagcattattaaagtttacagtttgaaaatcgtcttttattttttgtaggaaggaggcgtggaactcgatactatcgctaccgtatattttatttgcggtagctagtgtcgcacaatacggaatatctacctccatgtcatcattattgtcatcgggtgtattctcattcatattctctatatattttgatagttgttcagctgtagaaccagctgctccatgatttagaatagataaagtagataaaatggaaactggagaaatcaaaacattttcatcagggtgttttaagattagttctttaaagatatccatggtatagacctaacgataacgatatatatcataaataaataatgttaaatttcaatttatgtttgtaccccgtattcatacttaacaaattggtattgcgtacacaatcaatcatattacataccattaataatgcaagcataaaaaattgttagtagatgtttctaaatataggttccgtaagcaaagaatataagaatgaagcggtaatgataaaatcaatcgttatctaaaatgatcatactcatttattttattctattatattaacacatacatttttaacagcaacacattcaatattgtattgttatttttatattatttacacaattaacaatatattattagtttatattactgaattaataatataaaattcccaatcttgtcataaacacacactgagaaacagcataaacacagaatccatcaaaaatgttgataaattatctgatgttgttgttcgctgctatgataatcagatcattcgccgatagtggtaacgctatcgaaacgacattgccagaaattacaaacgctacaacagatattccagctatcagattatgcggtccagagggagatggatattgtttacacggtgactgtatccacgctagagatattgacggtatgtattgtagatgctctcatggttatacaggcattagatgtcagcatgtagtattagtagactatcaacgttcagaaaacccaaacactacaacgtcatatatcccatctcccggtattatgcttgtattagtaggcattattatgtgttgtctattatctgtttataggttcactcgacgaactaaactacctatacaagatatggttgtgccataatttttataaatttttttatgagtatttttacaaaaatgtataaagtgtatgtcttatgtatatttataaaaatgctaagtatgcgatgtatctatgttatttgtatttatctaaacaatacctctacctctagatattatacaaaaattttttatttcggcatattaaagtaaaatctagttaccttgaaaatgaatacagtgggtggttccgtatcaccagtaagaacataatagtcaaatacagtatccgattgagattttgcatacaatactagtctagaaagaaatttgtaatcatcttctgtgacgggagtccatatatctgtatcatcgtctagtttatcagtgtcccatgctatattcctgttatcatcattagttaatgaaaataactctcgtgcttcagaaaagtcaaatattgtatccatacatacatctccaaaactatcgcttatacgtttatctttaacgatacctatacctagatggttatttactaacagacattttccagatctattgactataactcctatagtttccacatcaaccaagtaatgatcatctattgttatataacaataacataactcttttccatttttatcagtatgtatatctatatcaacgtcgtcgttgtagtgaatagtagtcattgatctattatatgaaacggatatgtctagaacggcaattgttttacgtccagttaacactttcgttgatttaaagtctagagtctttgcaaacataatatccttatccgactttatatttcctgtagggtggtataattttattttgcctccacatatcggtgtttccaaatatattactagacaatattccatatagttattagttaagggtacccaattagaacacgtacgcttattatcatcatttggatcgtatttcataaaagttattgtgttatcgatgtcaacacattctacattttttaatcgtctatatagtatttttctgatattttctataatatcagaattgtcttccatcggaagttgtatactatcggaatcagttacatgtttaaataattctctgatgtcattccttatacaatcaaattcattattaaacagtttaatagtctgtagacctttatcgtcgtaaatatccattgtcttattagttacgcttatttttatgtgtttttacgttgctttattatattttataagaatgattgtttgacgaatcacgagaactattaagacacattattaggtatatattataaaaaagtttttgattacgatgttataagaggaaagaggacacattaacatcatacatcaattaactacattcttataacatcgtaatcaaaagaattgcaattttgatgtataacaactgtcaatgggttatggaattgtatattacatattatacggtatgttggtaacgacaaataccggtcggtaattgtctgccggtgtaatagaattatatatatctatctattacaccggccttgtatacataataataagttgtggtagtatgatctccatatttataatttaggactttgtattcagtatttttggaatcataaaaaataaaaaaaagttttactaatttaaaatttaaaaagtatttacatttttttcactgtttagtcgcggatatggaattcgatcctgccaaaatcaatacatcatctatagatcatgtaacaatattacaatacatagatgaaccaaatgatataagactaacagtatgcattatccgaaatattatatcaatatcacaaaaataaatacacatttggctaatcaatttcgggcttggaaaaaacgtatcgccggaagggactatatgactaacttatctagagatacaggaatacaacaatcaaaacttactgaaactatacgtaactgtcaaaaaaatagaaacatatatggtctatatatacactacaatttagttattaattggataaccgatgtgattatcaatcaatattaagagggttggtaaattggtacatagctaataatacctatactccaaatacacccaataatacaacaaccatttctgagttggatatcatcaaaatactaaataaatacgaggacgtgtatagagtaagtaaagaaaaagaatgtggaatttgctatgaagttgtttactcaaaacgatagatactttggtttattggattcgtgtactcatatattttgcataacatgcatcaatatatggcatagaacacgaagagaaaccggtgcgtcggataattgtcctatatgccgtacccgttttagaaacataacaatgagcaagttctataagctagttaactaataaataaaaagtttaatttgttgacgacgtatgtcgttattttttctcgtataaaagattaatttgattctaatataatctttagtattggataaatatcaattcaaattaattccattagattatatcataaataaaaatagtagcacacaactacttcagcaaacattctttttataaatgccatctagcgtagcgaggacacaagtgaacctataattatcaaatttattagtatcagtcacatgaaggactttacgtagagtgacgattccactatctgtggtacgaacggtttcatcttctttgatgccatcacccagatgttctataaacttggtatcctcgtccgatttcatatcctttgccaaccaatacatatagctaaactcaggcatatgttccacacatcctgaacaatgaaattctccagaagatgttacaatgtctagatttggacatttggtttcaaccgcgttaacatatgagtgaacacacccatacatgaaagcgatgagaaataggattctcatcttgccaaaatatcactagaaaaaatttatttatcagttttaaaggtataaaaaatacttattgttgctcgaatattttgtatttgatggtatacggaagattagaaatgtaggtattatcatcaactgattctatggttttatgtattctatcatgtttcactattgcgttggaaataatatcatatgcttccacatatattttattttgttttaactcataatactcacgtaattctggattattggcatatctatgaataattttagctccatgatcagtaaatattaatgagaacatagtattaccacctaccattatttttttcatctcattcaattcttaattgcaaagatctatataatcattatagcgttgacttatggactctggaatcttagacgatgtacagtcatctataatcatggcatatttaatacattgttttatagcatagtcgttatctacgatgttagatatttctctcaatgaatcaatcacacaatctaatgtaggtttatgacataatagcattttcagcagttcaatgtttttagattcgttgatggcaatggctatacatgtatatccgttatttgatctaatgttgacatctgaaccggattctagcagtaaagatactagagattgtttattatatctaacagccttgtgaagaagtgtttctcctcgtttgtcaatcatgttaatgtctttaagataaggtaggcaaatgtttatagtactaagaattgggcaagcataagacatgtcacaaagacccttttttgtatgtataagtgtaaaaattataacatccatagttggatttacataggtgtccaatcgggatctctccatcatcgagataattgatggcatctcccttccttttttagtagatatttcatcgtgtaagaatcaatattaatatttctaaagtatccgtgtatagcctctttatttaccacagctccatattccactagagggatatcgccgaatgtcatatactcaattagtatatgttggaggacatccgagttcattgttttcaatatcaaagagatggtttccttatcatttctccatagtggtacaatactacacattattccgtgcggctttccattttccaaaaacaatttgaccaaatctaaatctacatctttattgtatctataatcactatttagataatcagccataattcctcgagtgcaacatgttagatcgtctatatatgaataagcagtgttatctattcctttcattaacaatttaacgatgtctatatctatatgagatgacttaatataatattgaagagctgtacaatagtttttatctataaaagacggcttgattccgtgattaattagacatttaacaacttccggacgcacatatgctctcgtatccgactctgaatacagatgagagatgatatacagatgcaatacggtaccgcaatttcgtagttgataatcatcatacgcgtatcagtactcgtcctcataaagaacactgcagccattttctatgaacaaatcaataattttagaaacaggatcattgtcattacataattttctataactgaacgatggttttcacatttaacactcaagtcaaatccatgttctaccaacacctttatcaagtcaacgtctacatttttggatttcatatagctgaatatattaaagttatttatgttgctaaatccagtggcttctagtagagccatcgctatatccttattaactttaacatgtctactatttgtgtattcttctaatggggtaagctgtctccaatttttgcgtaatggattagtgccactgtctagtagtagtttgacgacctcgacattattacaatgctcattaaaaaggtatgcgtgtaaagcattattcttgaattggttcctggtatcattaggatctctgtctttcaacatctgtttaagttcatcaagagccacctcctcattttccaaatagtcaaacattttgactgaatgagctactgtgaactctatacacccacacaactaatgtcattaaatatcatgtcaaaaacttgtacaattattaataaaaataatttagtgtttaaattttaccagttccagattttacacctccgttaatacctccattaaccccactggacgatcctcctccccacattccaccgccaccagatgtataagttttagatcctttattactaccatcatgtccatggataaagacactccacatgccgccactaccccctttagaagacatattaataagacttaaggacaagtttaacaataaaattaatcacgagtaccctactaccaacctacactattatatgattatagtttctatttttacagtaccttgactaaagtttctagtcacaagagcaatactaccaacctacactattatatgattatagtttctatttttataggaacgcgtacgagaaaatcaaatgtctaatttctaacggtagtgttgataaacgattgttatccgcggatacctcctctatcatgtcgtctattttcttactttgttctattaacttattagcattatatattatttgattataaaacttatattgcttattagcccaatctgtaaatatcggattattaacatatcgtttctttgtaggtttatttaacatgtacatcactgtaagcatgtccttaccatttattttaatttgacgcatatccgcaatttctttttcgcagtcggttataaattctatatatgatggatacatgctacatgtgtacttataatcgactaatatgaagtacttgatacatattttcagtaacgatttattattaccacctatgaataagtacctgtgatcgtctaggtaatcaactgttttcttaatacattcgatggttggtaatttactcagaataatttccaatatcttaatatataattctgctatttctgggatatatttatctgccagtataacacaaatagtaatacatgtaaacccatattttgttattatattaatgtctgcgccattatctattaaccattctactaggctgacactatgcgactcaatacaatgataaagtatactacatccatgtttatctattttgtttatatcatcaatatacggcttacaaagttttagtatcgataacacatccaactcacgcatagagaaggtagggaataatggcataatatttattaggttatcatcattgtcattatctacaactaagtttccattttttaaaatatactcgacaactttaggatctctattgccaaatttttgaaaatatttatttatatgcttaaatctatataatgtagctccttcatcaatcatacatttaataacattgatgtatactgtatgataagatacatattctaacaatagatcttgtatagaatctgtatatcttttaagaattgtggatattaggatattattacataaactattacacaattctaaaatataaaacgtatcacggtcgaataatagttgatcaactatataattatcgattttgtgatttttcttcctaaactgtttacgtaaatagttagatagaatattcattagttcatgaccactatagttactatcgaataacgcgtcaaatatttcccgtttaatatcgcatttgtcaagataataatagagtgtggtatgttcacgataagtataataacgcatctctttttcgtgtgaaattaaatagtttattacgtccaaagatgtagcataaccatcttgtgacctagtaataatataataatagagaactgttttacccattctatcatcataatcagtggtgtagtcgtaatcgtaatcgtctaattcatcatcccaattataatattcaccagcacgtctaatctgttctattttgatcttgtatccatactgtatgttgctacatgtaggtattcctttatccaataatagtttaaacacatctacattgggatttgatgttgtagcgtatttttctacaatattaataccatttttgatactatttatttctatacctttcgaaattagtaatttcaataagtctatattgatgttatcagaacatagatattcgaatatatcaaaatcattgatatttttatagtcgactgacgacaataacaaaatcacaacatcgtttttgatattattatttttcttggtaacgtatgcctttaatggagtttcaccatcatactcatataatggatttgcaccactttctatcaatgattgtgcactgctggcatcgatgttaaatgttttacaactatcatagagtatcttatcgttaaccatgattggttgttgatgctatcgcattttttggtttctttcatttcagttatgtatggatttagcacgtttgggaagcatgagctcatatgatttcagtactgtagtgtcagtactattagtttcaataagatcaatctctagatctatagaatcaaaacacgataggtcagaagataatgaatatctgtaggcttcttgttgtactgtaacttctggttttgttagatggttgcatcgtgctttaacgtcaatggtacaaattttatcctcgctttgtgtatcatattcgtccctactataaaattgtatattcagattatcatgcgatgtgtatacgctaacggtatcaataaacggagcacaccatttagtcataaccgtaatccaaaaatttttaaagtatatcttaacgaaagaagttgtgtcattgtctacggtgtatggtactagatcctcataagtgtatatatctagagtaatgtttaatttattaaatggttgataatatggatcctcgtgacaatttccgaagatggaaataagacataaacacgcaataaatctaattgcggacatggttactccttaaaaaaatacgaataatcaccttggctatttagtaagtgtcatttaacactatactcatattaatccatggactcataatctctatacgggattaacggatgttctatatacggggatgagtagttctcttctttaactttatactttttactaatcatatttagactgatgtatgggtaatagtgtttgaagagctcgttctcatcatcagaataaatcaatatctctgtttttttgttatacagatgtattacagcctcatatattacgtaatagaacgtgtcatctaccttattaactttcaccgcatagttgtttgcaaatacggttaatcctttgacctcgtcgatttccgaccaatctgggcgtataatgaatctaaactttaattgcttgtaatcattcgaaataatttttagtttgcatccgtagttatcccctttatgtaactgtaaatttctcaacgcgatatctccattaataatgatgtcgaattcgtgctgtatacccatactgaatggatgaacgaataccgacggcgttaatagtaatttactttttcatctttacatattgggtactagttttactatcataagtttataaattccacaagctactatggaataagccaaccatcttagtataccacacatgtcttaaagtttattaattaattacatgttgttttatatatatcgctacgaatttaaagagaaattagtttaggaagaaaaattatctatctacatcatcacgtctctgtattctacgatagagtgctactttaagatgcgacagatccgtgtcatcaaatatatactccattaaaatgattattccggcagcgaacttgatattggatatatcacaacctttgttaatatctacgacaatagacagcagtcccatggttccataaacagtgagtttatctttctttgaagagatattttgtagagatcttataaaactgtcgaatgacatcgcatttatatctttagctaaatcgtatatgttaccatcgtaatatctaaccgcgtctatcttaaacgtttccatcgctttaaagacgtttccgatagatggtctcatttcatcagtcatactgagccaacaaatataatcgtgtataacatctttgatagaatcagactctaaagaaaacgaatcggctttattatacgcattcatgataaacttaatgaaaaatgtttttcgttgtttaagttggatgaatagtatgtcttaataattgttattatttcattaattaatatttagtaacgagtacactctataaaaacgagaatgacataactaatcataactagttatcaaagtgtctaggacgcgtaattttcatatggtatagatcctgtaagcattgtctgtattctggagctattttctctatcgcattagtgagttcagaatatgttataaatttaaatcgaataacgaacataactttagtaaagtcgtctatattaactcttttattttctagccatcgtaataccatgtttaagatagtatattctctagttactacgatctcatcgttgtctagaatatcacatactgaatctacatccaattttagaaattggtctgtgttacatatctcttctatattattgttgatgtattgtcgtagaaaactattacgtagaccattttctttataaaacgaatatatagtactccaattatctttaccgatatatttgcacacataatccattctctcaatcactacatctttaagattttcgttgttaagatatttggctaaactatataattctattagatcatcaacagaatcagtatatatttttctagatccaaagacgaactctttggcgtcctctataatattcccagaaaagatattttcgtgttttagtttatcgagatctgatctgttcatatacgccatgattgtacggtacgttatgataaccgcataaaataaaaatccattttcatttttaaccaatactattcataattgagattgatgtaatactttgttactttgaacgtaaagacagtacacggatccgtatctccaacaagcacgtagtaatcaaatttggtgttgttaaacttcgcaatattcatcaatttagatagaaacttatactcatcatctgttttaggaatccatgtattattaccactttccaacttatcattatcccaggctatgtttcgtccatcatcgttgcgcagagtgaataattcttttgtattcggtagttcaaatatatgatccatgcatagatcggcaaagctattgtagatgtgatttttcctaaatctaatataaaactcgtttactagcaaacactttcctgatttatcgaccaagacacatatggtttctaaatctatcaagtggtggggatccatagttatgacgcagtaacatatattattacattcttgactgtcgctaatatctaaatatttattgttatcgtattggattctgcatatagatggcttgtatgtcaaagatatagaacacataaccaatttatagtcgcgctttacattctcgaatctaaagttaagagatttagaaaacattatatcctcggatgatgttatcactgtttctggagtaggatatattaaagtctttacagatttcgtccgattcaaataaatcactaaataatatcccacattatcatctgttagagtagtatcattaaatctattatattttatgaaagatatatcactgctcacctctatatttcgtacatttttaaactgtttgtataatatctctctgatacaatcagatatatctattgtgtcggtagacgataccgttacatttgaattaatggtgttccattttacaacttttaacaagttgaccaattcatttctaatagtatcaaactctccatgattaaatattttaatagtatccattttatatcactacggacacaaagtagctgacataaaccattgtataatttttatgttttatgtttattagcgtacacattttggaagttccggcttccatgtatttcctggagagcaagtagatgatgaggaaccagatagtttatatccgtacttgcacttaaagtctacattgtcgttgtatgagtatgatcttttaaacccgctagacaagtatccgtttgatattgtaggatgtggacatttaacaatctgacacgtgggtggatcggaccattctcctcctgaacacaggacactagagttaccaatcaacgaatatccactattgcaactataagttacaacgctcccatcggtataaaaatcctcgtatccgttatgtcttccgttggatatagatggaggggattggcatttaacagattcacaaataggtgcctcgggattccataccatagatccagtagatcctaattcacaatacgatttagattcaccgatcaactgatatccgctattacaagagtacgttatactagagccaaagtctactccaccaatatcaagttggccattatcgatatctcgaggcgatgggcatctccgtttaatacattgattaaagagtgtccatccagtacctgtacatttagcatatataggtcccattttttgctttctgtatccaggtagacatagatattctatagtgtctcctatgttgtaattagcattagcatcagtctccacactattcttaaatttcatattaatgggtcgtgacggaatagtacagcatgatagaacgcatcctattcccaacaatgtcaggaacgtcacgctctccaccttcatatttatttatccgtaaaaatgttatcctggacatcgtacaaataataaaaagcccatatatgttcgctattgtagaaattgtttttcacagttgctcaaaaacgatggcagtgacttatgagttacgttacactttggagtctcatctttagtaaacatatcataatattcgatattacgagttgacatatcgaacaaattccaagtatttgattttggataatattcgtattttgcatctgctataattaagatataatcaccgcaagaacacacgaacatctttcctacatggttaaagtacatgtacaattctatccatttgtcttccttaactatatatttgtatagataattacgagtctcgtgagtaattccagtaattacatagatgtcgccgtcgtactctacagcataaactatactatgatgtctaggcatgggagacttttttatccaacgatttttagtgaaacattccacatcgtttaatactacatatttctcatacgtggtataaactccacccattacatatatatcatcgtttacgaataccgacgcgcctgaatatctaggagtaattaagtttggaagtcttatccatttcgaagtgccgtgtttcaaatattctgccacacccgttgaaatagaaaattctaatcctcctattacatataactttccatcgttaacacaagtactaacttctgattttaacgacgacatattagtaaccgttttccattttttcgttttaagatctacccgcgatacggaataaacatgtctattgttaatcatgccgccaataatgtatagacaattatgtaaaacatttgcattatagaattgtctatctgtattaccgactatcgtccaatattctgttctaggagagtaatgggttattgtggatatataatcagagtttttaatgactactatattatgttttataccatttcgtgtcactggctttgtagatttggatatagttaatcccaacaatgatatagcattgcgcatagtattagtcataaacttgggatgtaaaatgttgatgatatctacatcgtttggatttttatgtatccactttaataatatcatagctgtaacatcctcatgatttacgttaacgtcttcgtgggataagatagttgtcagttcatcctttgataattttccaaattctggatcggatgtcaccgcagtaatattgttgattatttctgacatcgacgcattatatagttttttaattccatatcttttagaaaagttaaacatccttatacaatttgtgaaattaatattatgaatcatagtttttacacatagatctactacaggcggaacatcaattattatggcagcaactagtatcatttctacattgtttatggtgatgtttatcttcttccagcgcatatagtctaatagcgattcaaacgcgtgatagtttataccattcaatataatcgcttcatcctttagatggtgatcctgaatgcgtttaaaaaaattatacggagacgccgtaataatttccttattcacttgtataatttccccattgatagaaaatattacgctttccattcttaaagtactataagtaattatagtataatgtaaacgtttatatattcaatatttttataaaaatcattttgacattaattcctttttaaatttccgtctatcatctatagaaacgtattctatgaatttataaaatgcttttacgtgtcctatcgtaggcgatagaaccgctaaaaagcctatcgaatttctacaaaagaatctgttatatggtatagggagagtataaaacattaaatgtccgtacttattaaagtattcagtagccaatcctaactctttcgaatacttattaatggctcttgttctgtacgaatctatttttttgaacaacggacctagtggtatatcttgttctatgtatctaaaataatgtctgactagatccgttagtttaatatccgcagtcatcttgtctagaatggcaaatctaactgcgggtttaggctttagtttagtttctatatctacatctatgtctttatctaacaccaaaaatataatagctaatattttattacaatcatccggatattcttctacgatctcactaactaatgtttctttggttatactagtatagtcactatcggacaaataaagaaaatcagatgatcgatgaataatacatttaaattcatcatctgtaagatttttgagatgtctcattagaatattattagggttagtactcattatcattcggcagctattacttattttattatttttcaccatatagatcaatcattagatcatcaaaatatgtttcaatcatcctaaagagtatggtgaatgactcttcccatctaatttctgaacgttcaccaatgtctctagccactttggcactaatagcgatcattcgcttagcgtcttctatattattaactggttgatttaatctatctagcaatggaccgtcggacagcgtcattctcatgttcttaatcaatgtacatacatcgccgtcatctaccaattcatccaacaacataagctttttaaaatcatcattataataggtttgatcgttgtcatttctccaaagaatatatctaataagtagagtcctcatgcttagttaacaactattttttatgttaaatcaattagtacaccgctatgtttaatacttattcatattttagtttttaggattgagaatcaatacaaaaattaatgcatcattaattttagaaatacttagtttccacgtagtcaatgaaacatttgaactcatcgtacaggacgttctcgtacaggacgtaactataaaccggtttatatttgttcaagatagatacaaatccgataactttttttacgaattctacgggatccactttaaaagtgtcataccgggttctttttatttttttaaacagatcaatggtgtgatgttgattaggtcttttacgaatttgatatagaatagcgtttacatattctccataatggtcaatcgccatttgttcgtatgtcataaattctttaattatatgacactgtgtattatttagttcatccttgttcattgttaggaatctatccaaaatggcaattatactagaactataggtgcgttgtatacacatattgatgtgtctgtttatacaatccatgatatttggatccatgctactaccttcgggtaaaattgtagcatcatataccatttctagtactttaggttcattattatccattgcagaggacgtcatgatcgaatcataaaaaaatatattatttttatgttattttgttaaaaataatcatcgaatacttcgtaagatactccttcatgaacataatcagttacaaaacgtttatatgaagtaaagtatctacgatttttacaaaagtccggatgcataagtacaaagtacgcgataaacggaataataatagatttatctagtctatctttttctatagctttcatagttagatacatggtctcagaagtaggattatgtaacatcagcttcgataaaatgactgggttatttagtcttacacattcgctcatacatgtatgaccgttaactacagagtctacactaaaatgattgaacaatagatagtctaccattgtttcgtattcagatagtacagcgtagtacatggcatcttcacaaattatatcattgtctaatagatatttgacgcatcttatggatcccacttcaacagccatcttaaaatcatattgctttcctttatcattaataatttctagaacatcatctctatcataaaagatacaaatattaactgtttgatccgtaataacattgctagtcaatagcaatttgttaataagatgcgctgggctcaatgtcttaataagaagtgtaagaggactatctccgaatttgttttgtttattaacatccgttgatggaagtaaaagatctataatgtctacattcttgactgttttagagcatacaatatggagaggtgtatttccatcatgatctggttttgagggactaattcctagtttcatcatccatgagattgtagaagcttttggattgtctgacataagatgtctatgaatatgatttttgccaaatttatccactatcctggcttcgaatccgatggacattatttttttaaacactctttctgaaggatctgtacacgccaacaacggaccacatccttcttcatcaaccgagttgttaatcttggctccatactgtaccaataaatttattctctctatgacttcatcatctgttcccgagagataatatagaggtgttttatgctgtttatcacacgcgtttggatctgcgccgtgcgtcagcagcatcgcgactattctattattattaattttagaagctatatgcaatggataatttccatcatcatccgtctcatttggagagtatcctctatgaagaagttcttcgacaaatcgttcatctagtcctttaattccacaatacgcatgtagaatgtgataattatttccagaaggttcgatagcttgtagcatattcctaaatacatctaaatttttactattatatttggcataaagagatagataatactcggccgacataatgttgtccattgtagtataaaaattaatatttctatttctatttctgtatatttgcaacaatttactctctataacaaatatcataacttagtttttttatgtcaagaaggcactggtttagttcatctataaatgtcacgccataactaccacgcatgccatactcagaattatgataaagatatttatccttggggtgtaggtaatggggattaatctttgttggatcagtctctaagttaacacatgtcacacatgatccatttatagttatatcacacgatgatgatttatgaattgattccggaagatcgctatcgtattttgtggttccacaattcatttccatacatgttattgtcacactaatattatgatgaactttatctagccgctgagtggtaaacaacagaacagatagtttattatctttaccaacaccctcagccgctgccacaaatctctgatccgtatccatgatggtcatgtttatttctagtccgtatccagtcaacactatgttagcatttctgtcgatatagctttcactcatatgacactcaccaataatagtagaattaatgtcgtaatttacaccaatagtgagttcggcggcaaagtaccaataccggtaatcttgtcgaggaggacatatagtattcttgtattctaccgaatacccgagagatgcgatacaaaagagcaagactaatttgtaaaccatcttactcaaaatatgtaacaatagtacgatgcaatgagtaagacaataggaaatctatcttatatacacataattattctatcaattttaccaattagttagtgtaatgttaacaaaaatgtgggagaatctaattagtttttctttacacaattgacgtacatgagtctgagttccttgtttttgctaattatttcatccaatttattattcttgacgatatcgagatcttttgtataggagtcaaacttgtattcaacatgcttttctataatcattttagctatttcggcatcatccaatagtacattttccagattagcagaatagatattaatgtcgtatttgaacagagcctgtaacatctcaatgtctttattatctatagccaatttaatgtccggaatgaagagaagggaattattggtgtttgtcgacgtcatatagtcgagcaagagaatcatcatatccacgtgtccattttttatagtgatgtgaatacaactaaggagaatagccagatcaaaagtagatggtatctctgaaagaaagtaggaaacaatacttacatcattaagcatgacggcatgataaaatgaagttttccatccagttttcccatagaacatcagtctccaatttttcttaacaaacagttttaccgtttgcatgttaccactatcaaccgcataatacaatgcggtgtttcccttgtcatcaaattgtgaatcatccagtccactgaatagcaaaatctttactattttggtatcttccaatgtggctgcctgatgtaatggaaattcattctctagaagatttttcaatgctccagcgttcaacaacgtacatactagacgcacgttattatcagctattgcataatacaaggcactatgtccatggacatccgccttaaatgtatctttactagagagaaagcttttcagctgcttagacttccaagtattaattcgtgacagatccatgtctgaaacgagacgctaattagtgtatattttttcattttttataattttgtcatattgcaccagaattaataatatctttaatagatctgattagtagatacatggctatcgcaaaacaacatatacacatttaataaaaataatatttattaagaaaattcagatttcacgtacccatcaatataaataaaataatgattccttacaccgtacccatattaaggagattccaccttacccataaacaatataaatccagtaatatcatgtctgatgatgaacacaaatggtgtattaaattccagtttttcaggagatgatctcgccgtagctaccataatagtagatgcctctgctacagttccttgttcgtcgacatctatctttgcattctgaaacattttataaatatataatgggtccctagtcatatgtttaaacgacgcattatctggattaaacatactaggagccatcatttcggctatcgacttaatatccctcttattttcgatagaaaatttagggagtttaagattgtacactttattccctaattgagacgaccaatagtctaattttgcagccgtgatagaatctgtgaaatgggtcatattatcacctattgccaggtacatactaatattagcatccttatacggaaggcgtaccatgtcatattctttgtcatcgattgtgattgtatttccttgcaatttagtaactacgttcatcatgggaaccgttttcgtaccgtacttattagtaaaactagcattgcgtgttttagtgatatcaaacggatattgccatatacctttaaaatatatagtattaatgattgcccatagagtattattgtcgagcatattagaatctactacattagacataccggatctacgttctactatagaattaattttattaaccgcatctcgtctaaagtttaatctatataggccgaatctatgatattgttgataatacgacggtttaatgcacacagtattatctacgaaactttgataagttagatcagtgtacgtatatttagatgttttcagcttagctaatcctgatattaattctgtaaatgctggacccagatctctttttctcaaatccatagtcttcaataattctattctagtattacctgatgcaggcaatagcgacataaacatagaaaacgaataaccaaacggtgagaagacaatattatcatcttgaatatttttatacgctactataccggcattggtaaatccttgtagacgataggcggacgctgaacacgctaacgatagtatcaataacgcaatcatgattttatggtattaataattaaccttatttttatgttcggtataaaaaaattattgatgtctacacatccttttgtaattgacatctatatatccttttgtataatcaactctaatcactttaacttttacagttttccctaccagtttatccctatattcaacatatctatccatatgcatcttaacactctctgccaagatagcttcagagtgaggatagtcaaaaagataaatatatagagcataatcattctcgtatactctgccctttattacatcacccgcattgggcaacgaataacaaaatgcaagcatcttgttaacgggctcgtaaattgggataaaaattatgtttttattgtcttatatctattttattcaagagaatattcaggaatttctttttccggttgtatctcgtcgcagtatatatcatttgtacattgtttcatattttttaatagtttacaccttttagtaggactagtatcgtacaattcatagctgtattttgaattccaatcacgcataaaaatatcttccaattgttgacgaagacctaatccatcatccggtgtaatattaatagatgctccacatgtatccgtaaagtaatttcctgtccaatttgaggtacctatataggccgttttatcggttaccatatatttggcatggtttaccctagaatacggaatgggaggatcagcatctggtacaataaatagctttacttctatatttatgtttttagattttagcatagcgatagatcttaaaaagtttctcatgataaacgaagatcgttgccagcaactaatcaatagcttaacggatacttgtctgtctatagcggatcttcttaattcatcttctatataaggccaaaacaaaattttacccgccttcgaataaataatagggataaagttcataacagatacataaacgaatttactcgcatttctaatacatgacaataaagcggttaaatcattggttctttccatagtacatagttgttgcggtgcagaagcaataaatacagagtgtggaacgccgcttacgttaatactaagaggatgatctgtattataatacgacggataaaagtttttccaattatatggtagattgttaactccaagataccagtatacctcaaaaatttgagtgagatccgctgccaagttcctattattgaagatcgcaatacccaattccttgacctgagttagtgatctccaatccatgttagcgcttcctaaataaatatgtgtattatcagatatccaaaattttgtatgaagaactcctcctaggatatttgtaatatctatgtatcgtacttcaactccggccatttgtagtctttcaacatcctttaatggtttgttagatttattaacggctactctaactcgtactcctcttttgggtaattgtacaatctcgtttaatattatcgtgccgaaattcgtacccacttcatccgataaactccaataaaaagatgatatatctagtgtttttgtggtattggatagaatttccctccacatgttaaatgtagacaaatatactttatcaaattgcatacctataggaatagtttctgtaatcactgcgattgtattatccggattcattttatttgttaaaagaataatcctatatcacttcactctattaaaaatccaagtttctatttctttcatgactgattttttaacttcatccgtttccttatgaagatgatgtttggcaccttcataaatttttatttctctattacaatttgcatgttgcatgaaataatatgcacctaaaacatcgctaatcttattgtttgttccctggagtatgagagtcggggggtgttaatcttggaaattatttttctaaccttgttggtagccttcaagacctgactagcaaatccagccttaattttttcatgattgactaatgggtcgtattggtatttataaactttatccatatctctagatactgattctggacatagctttccgactggcgcatttggtgtgatggttcccataagtttggcagctagcagattcagtcttgaaacagcatctgcattaactagaggagacattagaatcattgctgtaaacaagtttggattatcgtaagaggctagctcccatggaatgacccaataagtagatttaatagttaccacgtgctgtaccaaagtcatcaatcatcattttttcaccattacttcttccatgtccaatatgatcatgtgagaatactaaaattcctaacgatgatatgttttcagctagttcgtcataacgtccagaatgtttaccagctccatgacttatgaatactaatgccttaggatatgtaataggtttccaatatttacaatatatgtaatcattgtccagattgaacatacagtttgcactcatgattcacgttatataactatcaatattaacagttcgtttgatgatcatattatttttatgttttattgataattgtaaaaacatacaattaaatcaatatagaggaaggagacggctactgtcttttgtaagatagtcatggcgactaaattagattatgaggatgctgttttttactttgtggatgatgataaaatatgtagtcgcgactccatcatcgatctaatagatgaatatattacgtggagaaatcatgttatagtgtttaacaaagatattaccagttgtggaagactgtacaaggaattgatgaagttcgatgatgtcgctatacggtactatggtattgataaaattaatgagattgtcgaagctatgagcgaaggagaccactacatcaattttacaaaagtccatgatcaggaaagtttattcgctaccataggaatatgtgctaaaatcactgaacattggggatacaaaaagatttcagaatctagattccaatcattgggaaacattacagatttgatgaccgacgataatataaacatcttgatactttttctagaaaaaaaattgaattgatgatataggggtcttcataacgcataattattacgttagcattctatatccgtgttaaaaaaaattatcctatcatgtatttgagagttttatatgtagcaaacatgatagctgtgatgccaataagctttagatattcacgcgtgctagtgttagggatggtattatctggtggtgaaatgtccgttatataatctacaaaacaatcatcgcatatagtatgcgatagtagagtaaacatttttatagtttttactggattcatacatcgtctacccaattcggttataaatgaaattgtcgccaatcttacacccaaccccttgttatccattagcatagtattaacttcgttatttatgtcataaactgtaaatgattttgtagatgccatatcatacatgatattcatgtccctattataatcattactaactttatcacaatatatgttgataatatctatatatgatctagtctttgtgggcaactgtctatacaagtcgtctaaacgttgtttactcatatagtatcgaacagccatcattacatggtcccgttccgttgatagataatcgagtatgttagtggacttgtcaaatctatataccatattttctggaagtggatatacatagtcgtgatcaacattattgctagcctcatcttctatatcctgtactataccattatctatatcatctacataatctatgatattattacacataaacatcgacaacatactattgtttattatctaagtcctgttgatccaaacccttgatctcctctatttgtactatctagagattgtacttcttccagttctggataatatatacgttgatagattagctgagctattctatctccagtatttacattaaacgtacattttccattattaataagaatgactcctatgtttcccctataatcttcgtctattacaccacctcctatatcaatgccttttagtgacagaccagacctaggagctattctaccatagcagaacttaggcatggacatactaatatctgtcttaattaactgtctttctcctggagggatagtataatcgtaagcgctatacaaatcatatccggcagcacccggcgattgcctagtaggagatttagctctgttagtttccttaacaaatctaactggtgagttaatattcatgttgaacataaaactaatattttatttcaaaattatttaccatcccatatattccatgaataagtgtgatgattgtacacttctatagtatctatatacgatccacgataaaatcctcctatcaatagcagtttattatccactatgatcaattctggattatccctcggataaataggatcatctatcagagtccatgtattgctggattcacaataaaattccgcatttctaccaaccaagaataaccttctaccgaacactaacgcgcatgatttataatgaggataataagtggatggtccaaactgccactgatcatgattgggtagcaaatattctgtagttgtatcagtttcagaatgtcctcccattacgtatataacattgtttatggatgccactgctggattacatctaggtttcagaagactcggcatattaacccaagcagcatccccgtggaaccaacgctcaacagatgtgggatttggtagacctcctactacgtataatttattgttagcgggtatcccgctagcatacagtctggggctattcatcggaggaattggaatccaattgtttgatatataatttacagctatagcattgttatgtatttcattgttcatccatccaccgatgagatatactacttctccaacatgagtacttgtacacatatggaatatatctataatttgatccatgttcataggatactctatgaatggatacttgtatgatttgcgtggttgtttatcacaatgaaatattttggtacagtctagtatccattttacattatttatacctctgggagaaagataatttgacctgattacatttttgataaggagtagcagatttcctaatttatttcttcgcctcatataccacttaatgacaaaatcaactacataatcctcatctggaacatttagttcatcgctttctagaataagtttcatagatagataatcaaaattgtctatgatgtcatcttccagttccaaaaagtgtttggcaataaagtttttagtatgacataagagattggatagtccgtattctatacccatcatgtaacactcgacacaatattcctttctaaaatctcgtaagataaagtttatacaagtgtagatgataaattctacagaggttaatatagaagcacgtaataaattgacgacgttatgactatctatatatacctttccagtatatgagtaaataactatagaagttaaactgtgaatgtcaaggtctagacaaacccttgtaactggatctttatttttcgtgtatttttgacgtaaatgtgtgcgaaagtaaggagataactttttcaatatcgtagaattgactattatattgcctcctatggcatcaataattgttttgaatttcttagtcatagacaatgctaatatattcttacagtacacagtattgacaaatatcggcatttatgtttctttaaaagtcaacatctagagaaaaatgattatctttttgagacataactcccattttttggtattcacccacacgtttttcgaaaaaattagtttttccttccaatgatatattttccatgaaatcaaacggattggtaacattataaatttttttaaatcccaattcagaaatcaatctatccgcgacgaattctatatatgttttcatcatttcacaattcattcctataagtttaactggaagagccgcagtaagaaattcttgttcaatggatactgcatctgttataatagatctaacggtttcttcactcggtggatgcaataaatgtttaaacatcaaacatgcgaaatcgcagtgcagaccctcgtctctactaattagttcgttggaaaacgtgagtccgggcattaggccacgctttttaagccaaaatatggaagcgaatgatccagaaaagaaaattccttctactgcagcaaaggcaataagtctctctccataaccggcgctgtcatgtatccacttttgagcccaatcggccttcttttttacacaaggcatcgtttctatggcattaaagagatagtttttttcattactatctttaacataagtatcgatcaaaagactatacatttccgaatgaatgttttcaatggccatctgaaatccgtagaaacatctagcctcggtaatctgtacttctgtacaaaatcgttccgccaaattttcattcactattccgtcactggctgcaaaaaacgccaatacatgttttataaaatatttttcgtctggtgttagtttattccaatcattgatatctttagatatatctacttcttccactgtccaaaatgatgcctctgcctttttatacatgttccagatgtcatgatattggattgggaaaataacaaatctatttggatttggtgcaaggatgggttccataactaaattaacaataacaataaattttttttcagttatctatatgcctgtacttggattttttgtacatcgatatcgccgcaatcactacaataattacaagtattattgatagcattgttattagtactatcataattaaattatctacattcatgggtgctgaataatcgttattatcatcattatcattttgtaattgtgacatcatactagataaatcgtttgcgagattgttgtgggaagcgggcatggaggatgcattatcattattatttaacgccttccatttggattcacaaatgttacgcacattcaacattttatggaaactataattttgtgaaaacaaataacaagaaaactcgtcatcgttcaaatttttaacgatagtaaaccgattaaacgtcgagctaatttctaacgctagcgactctgttggatatgggtttccagatatatatcttttcagttcccctacgtatctataatcatctgtaggaaatggaagatatttccatttatctactgttcctaatatcatatgtggtggtgtagtagaaccattaagcgcgaaagatgttatttcgcatcgtattttaacttcgcaataatttctggttagataacgcactctaccagtcaagtcaatgatattagcctttacagatatattcatagtagtcgtaacgatgactccatcttttagatgcgatactcctttgtatgtaccagaatcttcgtacctcaaactcgatatatttaaacaagttaatgagatattaacgcgttttatgaatgatgatatataaccagaagttttatcctcggtggctagcgctataaccttatcattataataccaactagtgtgattaatatgtgacacgtcagtgtgggtacaaatatgtacattatcgtctacgtcgtattcgatacatccgcatacagccaacaaatataaaatgacaaatactctaacgccgttcgtacccatcttgatgcggtttaataaatgttttgatttcaatttattgtaaaaaaagattcggttttatactgttcgatattctcattgcttatattttcatctatcatctccacacagtcaaatccgtggttagcatgcacctcatcaaccggtaaaagactatcggactcttctatcattataactctagaatatttaatttggtcattattaatcaagtcaattatcttatttttaacaaacgtgagtattttactcattttttataaaaacttttagaaatatacagactctatcgtgtgtctatatcttctttttatatccaatgtatttatgtctgatttttcttcatttatcatatataatggtccaaattctacacgtgcttcggattcatccagatcattaaggttcttataattgtaacatccttctcttccctcttctacatcttccttcttattcttattcttagcgtcacagaatctaccacagcaggatcccatgacgagcgtcatattaaactaatccattttcaattataatatatgattagtaatgaccattaaaataaaaaatattcttcataaccggcaagaaagtgaaaagttcacattgaaactatgtcagtagtatacatcatgaaatgatgatatatatatactctattttggtggaggattatatgatataattcgtggataatcatttttaagacacatttctttattcgtaaatcttttcacgttaaatgagtgtccatattttgcaatttcttcatatgatggcggtgtacgtggacgaggctgctcctgttcttgttgtggtcgccgactgtcgtgtctgcgtttagatccctccattatcgcgattgcgtagatggagtactattttataccttgtaattaaatttttttattaattaaacgtataaaaacgttccgtatctgtatttaagagccagatttcgtctaatagaacaaatagctacagtaaaaataactagaataattgctacacccactagaaaccacggatcgtaatacggcaatcggttttcgataataggtggaacgtatattttatttaaggacttaacaattgtctgtaaaccacaatttgcttccgcggatcctgtattaactatctgtaaaagcatatgttgaccgggcggagccgaacattctccgatatctaatttctgtatatctataatattattaacctccgcatacgcattacagttcttttctagcttggataccgcactaggtacatcgtctagatctattcctatttcctcagcgatagctcttctatccttttccggaagcaatgaaatcacttcaataaatgattcaaccatgagtgtgaaactaagtcgagaattactcatgcatttgttagttattcggagcgcgcaatttttaaactgtcctataacctctcctatatgaatagcacaagtgacattagtagggatagaatgttgagctaatttttgtaaataactatctataaaaagattatacaaagttttaaactctttagtttccgccatttatccagtctgagaaaatgtctctcataataaatttttccaagaaactaattgggtgaagaatggaaacctttaatctatatttatcacagtctgttttggtacacatgatgaattcttccaatgccgtactaaattcgatatctttttcgatttctggatatgtttttaataaagtatgaacaaagaaatggaaatcgtaataccagttatgtttaactttgaaattgttttttattttcttgttaatgattccagccacttgggaaaagtcaaagtcgtttaatgccgatttaatacgttcattaaaaacaaactttttatcctttagatgaattattattggttcattggaatcaaaaagtaagatattatcgggtttaagatctgcgtgtaaaaagttgtcgcaacagggtagttcgtagattttaatgtataacagagccatctgtaaaaagataaactttatgtattgtaccaaagatttaaatcctaatttgatagctaactcggtatctactttatctgccgaatacagtgctaggggaaaaattataatgtttcctctttcatattcgtagttagttctcttttcatgttcgaaaaagtgaaacatgcggttaaaatagtttataacattaatattactgttaataactgccggataaaagtgggatagtaatttcacgaatttgatactgtcctttctctcgttaaacgcctttaaaaaaactttagaagaatatctcaatgagagttcctgaccatccatagtttgtatcaataatagcaacatatgaagaacacgtttatacagagtatgtaaaaatgttaatttatagtttaatcccatggcccacgcacacacgattaattttttttcatctccctttagattgttgtatagaaatttgggtactgtgaactccgccgtagtttccatgggactatataattttgtggcctcgaatacaaattttactacatagttatctatcttaaagactataccatatcctcctgtagatatgtgataaaaatcgtcgtttataggataaaatcgtttatccttttgttggaaaaaggatgaattaatgtaatcattctcttctatctttagtagtgtttccttattaaaattcttaaaataatttaacaatctaactgacggagcccaattttggtgtaaatctaattgggacattatattgttaaaatacaaacagtctcctaatataacagtatctgataatctatggggagacatccattgatattcaggggatgaatcattggcaacacccatttattgtacaaaaagccccaatttacaaacgaaagtccaggtttgatagagacaaacaattaactattttgtctctgtttttaacacctccacagtttttaatttctttagtaatgaaattattcacaatatcagtatcttctttatctaccagagattttactaacttgataaccttggctgtctcattcaatagggtagtaatatttgtatgtgtgatattgatatctttttgaattgtttcttttagaagtgattctttgatggtgccagcatacgaattacaataatgcagaaactcggttaacatgcaggaattatagtaagccaattccaattgttgcctgtgttgtattagagtgtcaatatgagcaatggtgtccttgcgtttctctgatagaatgcgagcagcgattttggcgttatcatttgacgatatttctggaatgacgaatcctgtttctactaactttttggtaggacaaagtgaaacaatcaagaagatagcttctcctcctatttgtggaagaaattgaactcctctagatgatctactgacgatagtatctccttgacagatattggaccgaattacagaagtacctggaatgtaaagccctgaaaccccctcattttttaagcagattgttgccgtaaatcctgcactatgcccaagatagagagctcctttggtgaatccatctctatgtttcagtttaaccaagaaacagtcagctggtctaaaatttccatctctatctaatacagcatctaacttgatgtcaggaactatgaccggtttaatgttatatgtaacattgagtaaatccttaagttcataatcatcactgtcatcagttatgtacgatccaaacaatgtttctaccggcatagtggatacgaagatgctatccatcagaatgtttccctgattagtattttctatatagctattcttctttaaacgattttccaaatcagtaactatgttcatttttttaggagtaggacgcctagccagtatggaagaggattttctagatcctctcttcaacatctttgatctcgatggaatgcaaaaccccatagtgaaacaaccaacgataaaaataatattgtttttcactttttataattttaccatctgactcatggattcattaatatctttataagagctactaacgtataattctttataactgaactgagatatatacaccggatctatggtttccataattgagtaaatgaatgctcggcaataactaatggcaaatgtatagaacaacgaaattatactagagttgttaaagttaatattttctatgagctgttccaataaattatttgttgtgactgcgttcaagtcataaatcatcttgatactatccagtaaaccgtttttaagttctggaatattatcatcccattgtaaagcccctaattcgactatcgaatatcctgctctgatagcagtttcaatatcgacggacgtcaatactgtaataaaggtggtagtattgtcatcatcgtgataaactacgggaatatggtcgttagtaggtacggtaactttacacaacgcgatatataactttccttttgtaccatttttaacgtagttgggacgtcctgcagggtattgttttgaagaaatgatatcgagaacagatttgatacgatatttgttggattcctgattattcactataatataatctagacagatagatgattcgataaatagagaaggtatatcgttggtaggataatacatccccattccagtattctcggatactctattgatgacactagttaagaacatgtcttctattctagaaaacgaaaacatcctacatggactcattaaaacttctaacgctcctgattgtgtctcgaatgcctcgtacaaggatttcaaggatgccatagattctttgaccaacgatttagaattgcgtttagcatctgatttttttattaaatcgaatggtcggctctctggtttgctaccccaatgataacaatagtcttgtaaagataaaccgcaagaaaatttatacgcatccatccaaataaccctagcaccatcggatgatattaatgtattattatagattttccatccacaattattgggccagtatactgttagcaacggtatatcgaatagattactcatgtaacctactagaatgatagttcgtgtactagtcataatatctttaatccaatctaaaaaatttaaaattagattttttacactgttaaagttaacaaaagtattacccgggtacgtggatatcatatatggcattggtccattatcagtaatagctccataaactgatacggcgatggtttttatatgtgtttgatctaacgaggaagaaattcgcgcccacaattcatctctagatatgtatttaatatcaaacggtaacacatcaatttcgggacgcgtatatgtttctaaatttttaatccaaatataatgatgacctatatgccctattatcatactgtcaactatagtacacctagggaacttacgatacatctgtttcctataatcgttaaattttacaaatctataacatgctaaaccttttgacgacagccattcattaatttctgatatggaatctgtattctcgataccgtatcgttctaaagccagtgctatatctccctgttcgtgggaacgctttcgtataatatcgatcaacggataatctgaagtttttggagaataatatgactcatgatctatttcgtccataaacaatctagacataggaattggaggcgatgatcttaattttgtgcaatgagtcgtcaatcctataacttctaatcttgtaatattcatcatcgacataatactatctatgttatcatcgtatattagtataccatgaccttcttcatttcgtgccaaaatgatatacagtcttaaatagttacgcaatatctcaatagtttcataattgttagctgttttcatcaaggtttgtatcctgtttaacatgatggcgttctataacgtctctattttctatttttaattttttaaatttttaacgatttactgtggctagatacccaatctctctcaaatatttttttagcctcgcttacaagctgtttatctatactattaaaactgacgaatccgtgattttggtaatgggttccgtcgaaatttgccgaagtgatatgaacatattcgtcgtcgactatcaacaattttgtattattctgaatagtgaaaaccttcacagatagatcattttgaacacacaacgcatctagacttttggcggttgccatagaatatacgtcgttcttatcccaattaccaactagaagtctgatcttaactcctctattaatggctgcttctataatggagttgtaaatgtcgggccaatagtagctattaccgtcgacacgtgtagtgggaactatggccaaatgttcaatatctatactagtcttagctgacctgagtttatcaataactacatcggtatctagatctctagaatatcccaataggtgttccggagaatcagtaaagaacactccacctataggattcttaatatgatacgcagtgctaactggcaaacaacaagccgcagagcataaattcaaccatgaattttttgcgctattaaaggctttaaaagtatcaaatcttctacgaagatctgtggccagcgggggataatcagaatatacacctaacgttttaatcgtatgtatagatcctccagtaaatgacgcgtttcctacataacatctttcatcatctgacacccaaaaacaaccgagtagtagtcccacattattttttttatctatattaacggttataaaatttatatccgggcagtgactttgtagctctcccagatttcttttccctcgttcatctagcaaaactattattttaatccctttttcagatgcctcttttagtttatcaaaaataagcgctcccctagtcgtactcagaggattacaacaaaaagatgctatgtatatatatttcttagctagagtgataatttcgttaaaacattcaaatgttgttaaatgatcggatctaaaatccatattttctggtagtgtttctaccagcctacattttgctcccgcaggtaccgatgcaaatggccacatttagttaacataaaaacttatacatcctgttctatcaacgattctagaatatcatcggctatatcgctaaaattttcatcaaagtcgacatcacaacctaactcagtcaatatattaagaagttccatgatgtcatcttcgtctatttctatatccgtatccattgtagattgttgaccgattatcgagtttaaatcattactaatactcaatccttcagaatacaatctgtgtttcattgtaaatttataggcggtgtatttaagttggtagattttcaattatgtattaatatagcaacagtagttcttgctcctccttgattctagcatcctcttcattattttcttctacgtacataaacatgtccaatacgttagacaacacaccgacgatggcggccgcagatctcgagttatgatctacttccttaccgtgcaataaattagaatatattttctacttttacgagaaattaattattgtatttattatttatgggtgaaaaacttactataaaaagcgggtgggtttggaattagtgaaagcttaaaaattgaaattttattttttttttttggaatataaataagctcgaagtcgacagatctaggcctggtaccaggaggaggaattcagcttaaagatgacttcgaaagtttatgatccagaacaaaggaaacggatgataactggtccgcagtggtgggccagatgtaaacaaatgaatgttcttgattcatttattaattattatgattcagaaaaacatgcagaaaatgctgttatttttttacatggtaacgcggcctcttcttatttatggcgacatgttgtgccacatattgagccagtagcgcggtgtattataccagatcttattggtatgggcaaatcaggcaaatctggtaatggttcttataggttacttgatcattacaaatatcttactgcatggtttgaacttcttaatttaccaaagaagatcatttttgtcggccatgattggggtgcttgtttggcatttcattatagctatgagcatcaagataagatcaaagcaatagttcacgctgaaagtgtagtagatgtgattgaatcatgggatgaatggcctgatattgaagaagatattgcgttgatcaaatctgaagaaggagaaaaaatggttttggagaataacttcttcgtggaaaccatgttgccatcaaaaatcatgagaaagttagaaccagaagaatttgcagcatatcttgaaccattcaaagagaaaggtgaagttcgtcgtccaacattatcatggcctcgtgaaatcccgttagtaaaaggtggtaaacctgacgttgtacaaattgttaggaattataatgcttatctacgtgcaagtgatgatttaccaaaaatgtttattgaatcggatccaggattcttttccaatgctattgttgaaggcgccaagaagtttcctaatactgaatttgtcaaagtaaaaggtcttcatttttcgcaagaagatgcacctgatgaaatgggaaaatatatcaaatcgttcgttgagcgagttctcaaaaatgaacaagcggccgccgccaccatgagcaagggcgaggaactgttcactggcgtggtcccaattctcgtggaactggatggcgatgtgaatgggcacaaattttctgtcagcggagagggtgaaggtgatgccacatacggaaagctcaccctgaaattcatctgcaccactggaaagctccctgtgccatggccaacactggtcactaccttcacctatggcgtgcagtgcttttccagatacccagaccatatgaagcagcatgactttttcaagagcgccatgcccgagggctatgtgcaggagagaaccatctttttcaaagatgacgggaactacaagacccgcgctgaagtcaagttcgaaggtgacaccctggtgaatagaatcgagctgaagggcattgactttaaggaggatggaaacattctcggccacaagctggaatacaactataactcccacaatgtgtacatcatggccgacaagcaaaagaatggcatcaaggtcaacttcaagatcagacacaacattgaggatggatccgtgcagctggccgaccattatcaacagaacactccaatcggcgacggccctgtgctcctcccagacaaccattacctgtccacccagtctgccctgtctaaagatcccaacgaaaagagagaccacatggtcctgctggagtttgtgaccgctgctgggatcacacatggcatggacgagctgtacaagtgagcggccgccctgctagcaagcttgctagcggccgctcgagatctgcggccgctacagacacgaatatgactaaaccgatgaccatttaaaaacccctctctagctttcacttaaactgtatcgatcattcttttagcacatgtataatataaaaacattattctatttcgaatttaggcttccaaaaatttttcatccgtaaaccgataataatatatatagacttgttaatagtcggaataaatagattaatgcttaaactatcatcatctccacgattagagatacaatatttacattctttttgctgtttcgaaactttatcaatacacgttaatacaaacccaggaaggagatattgaaactgaggctgttgaaaatgaaacggtgaatacaataattcagataatgtaaaatcatgattccgtattctgatgatattagaactgctaatggatgtcgatggtatgtatctaggagtatctattttaacaaagcatcgatttgctaatatacaattatccttttgattaattgttattttattcatattcttaaaaggtttcatatttatcaattcttctacattaaaaatttccatttttaatttatgtagccccgcaatactcctcattacgtttcattttttgtctataatatccattttgttcatctcggtacatagattatccaattgagaagcgcatttagtagttttgtacattttaagtttattgacgaatcgtcgaaaactagttatagttaacattttattatttgataccctgatattaatacccctgccgttactattatttataactgatgtaatccacgtaacattggaattaactatcgatagtaatgcatcgacgcttccaaaattgtctattataaactcaccgataatttttttattgcatgttttcatattcattaggattatcaaatctttaatcttattacgattgtatgcgttgatattacaagacgtcattctaaaagacggaggatctccatcaaatgccagacaatcacgtacaaagtacatggaaataggttttgttctattgcgcatcatagatttatatagaacacccgtagaaatactaatttgttttactctataaaatactaatgcatctatttcatcgttttgtataacgtctttccaagtgtcaaattccaaatttttttcattgatagtaccaaattcttctatctctttaactacttgcatagataggtaattacagtgatgcctacatgccgttttttgaaactgaatagatgcgtctagaagcgatgctacgctagtcacaatcaccactttcatatttagaatatatatatgtaaaaatatagtagaatttcattttgtttttttctatgctataaatgaattctcattttgcatctgctcatactccgttttatattaataccaaagaaggaagatatctggttctaaaagccgttaaagtatgcgatgttagaactgtagaatgcgaaggaagtaaagcttcctgcgtactcaaagtagataaaccctcatcgcccgcgtgtgagagaagaccttcgtccccgtccagatgcgagagaatgaataaccctggaaaacaagttccgtttatgaggacggacatgctacaaaatatgttcgcggctaatcgcgataatgtagcttctagacttttgtcctaaaatactattatatccttttcgatattaataaatccgtgtcgtccaggttttttatctctttcagtatgtgaatagataggtattttatctctattcatcatcgaatttaagagatccgataaacattgtttgtattctccagatgtcagcatctgatacaacaatatatgtgcacataaacctctggcacttatttcatgtaccttccccttatcactaaggagaatagtatttgagaaatatgtatacatgatattatcatgaattagatatacagaatttgtaacactctcgaaatcacacgatgtgtcggcgttaagatctaatatatcactcgataacacattttcatctagatacactagacattttttaaagctaaaatagtctttagtagtaacagtaactatgcgattattttcatcgatgatacatttcatcggcatattattacgcttaccatcaaagactataccatgtgtatatctaacgtattctagcatggttgccatacgcgcattaaacttttcaggatctttggatagatcttccaatctatctatttgagaaaacatttttatcatgttcaatagttgaaacgtcggatccactatatagatattatctataaagattttaggaactacgttcatggtatcctggcgaatattaaaactatcaatgatatgattatcgttttcatcttttatcaccatatagtttctaagatatgggattttacttaatataatattatttcccgtgataaattttattagaaaggccaaatctataagaaaagtcctagaattagtctgaagaatatctatatcgccgtatagtatatttggattaattagatatagagaatatgatccgtaacatatacaacttttattatggcgtctaagatattcttccatcaacttattaacatttttgactagggaagatacattatgacgtcccattacttttgccttgtctattactgcgacgttcatagaatttagcatatctcttgccaattcttccattgatgttacattataagaaattttagatgaaattacatttggagctttaatagtaagaactcctaatatgtccgtgtatgtggtcactaatacagattgtagttctataatcgtaaataatttacctatattatatgtttgagtctgtttagaaaagtagctaagtatacgatcttttatttctgatgcagatgtattaacatcggaaaaaaatctttttttattcttttttactaaagatacaaatatgtctttgttaaaaacagttattttctgaatatttctagcttgtaattttaacatatgatattcgttcacactaggtactctgcctaaataggtttctataatctttaatgtaatattaggaaaagtattctgatcaggattcctattcattttgaggatttaaaactctgattattgtctaatatggtctctacgcaaactttttcacagagcgatagagtttttgataactcgtttttcttaagaaatataaaactactgtctccagagctcgctctatcttttattttatctaattcgatacaaactcctgatactggttcagaaagtaattcattaattttcagtcctttatagaagatatttaatatagataatacaaaatcttcagtttttgatatcgatctgattgatcctagaactagatatattaataacgtgctcattaggcagtttatggcagcttgataattagatatagtatattccagttcatatttattagataccgcattgcccagattttgatattctatgaattcctctgaaaataaatccaaaataactagacattctattttttgtggattagtgtactctcttccctctatcatgttcactactggtgtccacgatgataaatatctagagggaatataatatagtccataggatgccaatctagcaatgtcgaataactgtaattttattcttcgctcttcattatgaattgattcttgaggtataaacctaacacaaattatattattagacttttcgtatgtaatgtctttcatgttataagtttttaatcctggaatagaatctattttaatgaggcttttaaacgcagagttctccaacgagtcaaagcataatactctgttgtttttcttatatacgatgttacgattttcttctttgaatggaataggtttttgaattagtttataattacaacataatagataaggaagtgtgcaaatagtacgcggaaaaaacataatagctcccctgttttcatccatggttttaagtaaatgatcactggcttctttagtcaatggatattcgaacattaaccgtttcatcatcattggacagaatccatatttcttaatgtaaagagtgatcaaatcattgtgtttattgtaccatcttgttgtaaatgtgtattcggttatcggatctgctcctttttctattaaagtatcgatgtcaatctcgtctaagaattcaactatatcgacatatttcatttgtatacacataaccattactaacgtagaatgtataggaagagatgtaacgggaacagggtttgttgattcgcaaactattctaatacataattcttctgttaatacgtcttgcacgtaatctattatagatgccaagatatctatataattattttgtaagatgatgttaactatgtgatctatataagtagtgtaataattcatgtattttgatatatgttccaactctgtctttgtgatgtctagtttcgtaatatctatagcatcctcaaaaaatatattcgcatatattcccaagtcttcagttctatcttctaaaaaatcttcaacgtatggaatataataatctattttacctcttctgatatcattaatgatatagtttttgacactatcttctgtcaattgattcttattcactatatctaagaaacggatagcgtccctaggacgaactactgccattaatatctctattatagcttctggacataattcatctattataccagaattaatgggaactattccgtatctatctaacatagttttaagaaagtcagaatctaagacttgatgttcatatattggttcatacatgaaatgatctctattgatgatagtgactatttcattctctgaaaattggtaactcattctatatatgctttccttgttgatgaaggatagaatatactcaatagaatttgtaccaacaaactgttctcttatgaatcgtatatcatcatctgaaataatcatgtaaggcatacatttaacaattagagacttgtctcctgttatcaatatactattcttgtgataatttatgtgtgaggcaaatttgtccacgttctttaattttgttatagtagatatcaaatccaatggagctacagttcttggcttaaacagatatagtttttctggaacaaattctacaacattattataaaggactttgggtagataagtgggatgaaatcctattttaattaatgcgatagccttgtcctcgtgcagatatccaaacgcttttgtgatagtatggcattcattgtctagaaacgctctacgaatatctgtgacagatatcatctttagagaatatactagtcgcgttaatagtactacaatttgtattttttaatctatctcaataaaaaaattaatatgtatgattcaatgtataactaaactactaactgttattgataactagaatcagaatctaatgatgacgtaaccaagaagtttatctactgccaatttagctgcattatttttagcatctcgtttagattttccatcggccttatcgaatactcttccgtcgatgtctacacaggcataaaatgtaggagagttactaggcccaactgattcaatacgaaaagaccaatctctcctagtaatttggcagtactcattaataacggtgacagggttagcatctttccaatcaataatttttttagccggaataacatcatcaaaagacttatgatcctctctcattgatttttcgcgggatacatcatctattatgacgtcagccatagcatcagcatccggcttatccgcctccgttgtcataaaccaacgaggaggaatatcgtcggagctgtacaccatagcactacgttgaagatcgtacagagctttattaacttctcgcttctccatattaagttgtctagttagttgtgcagcagtagctccttcgattccaatgtttttaatagccgcacacacaatctctgcgtcagaacgctcgtcaatatagatcttagacatttttagagagaactaacgcaaccagcaataaaactgaacctactttatcatttttttattcatcatcctctggtggttcgtcgttcctatcaaatgtagctctgattaacccgtcatctataggtgatgctggttctggagattctggaggagatggattattatctggaagaatctctgttatttccttgttttcatgtatcgattgcgttgtaacattaagattgcgaaatgctctaaatttgggaggcttaaagtgttgtttgcaatctctacacgcgtgtctaactagtggaggttcgtcagctgctctagtttgaatcatcatcggcgtagtattcctacttttacagttaggacacggtgtattgtatttctcgtcgagaacgttaaaataatcgttgtaactcacatcctttattttatctatattgtattctactcctttcttaatgcattttataccgaataagagatagcgaaggaattctttttcggtgccgctagtacccttaatcatatcacatagtgttttatattccaaatttgtggcaatagacggtttatttctatacgatagtttgtttctggaatcctttgagtattctataccaatattattctttgattcgaatttagtttcttcgatattagattttgtattacctatattcttgatgtagtactttgatgatttttccatggcccattctattaagtcttccaagttggcatcatccacatattgtgatagtaattctcggatatcagtagcggctaccgccattgatgtttgttcattggatgagtaactactaatgtatacattttccatttataacacttatgtattaactttgttcatttatattttttcattattatgttgatattaacaaaagtgaatatatatatgttaataattgtattgtggttatacggctacaattttataatgagtgaaagtcagtgtccgatgatcaatgacgatagctttactctgaaaagaaagtatcaaatcgatagtgcggagtcaacaataaaaatggataagaagaggataaagtttcagaatagagccaaaatggtaaaagaaataaatcagacaataagagcagcacaaactcattacgagacattgaaactaggatacataaaatttaagagaatgattatgactactactctagaagatatagcaccatctattccaaataatcagaaaacttataaactattctcggacatttcagccatcggcaaagcatcacagaatccgagtaagatggtatatgctctgctgctttacatgtttcccaatttgtttggagatgatcatagattcattcgttatagaatgcatccaatgagtaaaatcaaacacaagatcttctctcctttcaaacttaatcttattagaatattagtggaagaaagattctataataatgaatgcagatctaataaatggagaataattggaacacaagttgataaaatgttgatagctgaatctgataaatatacaatagatgcaaggtataacctaaaacccatgtatagaatcaagggagaatctgaagaagataccctctttatcaaacagatggtagaacaatgtgtgacatcccaggaattggtggaaaaagtgttgaagatactgtttagagatttgttcaagagtggagaatacaaagcgtacagatacgatgatgatgtagaaaatggatttattggattggatacactaaaattaaacattgttcatgatatagttgaaccatgtatgcctgttcgtaggccagtggctaagatactgtgtaaagaaatggtaaataaatactttgagaatccgctacatattattggtaaaaatcttcaagagtgcattgactttgttagtgaataggcatttcatctttctccaatactaattcaaattgttaaattaataatggatagtataaatagttattagttataagatagtaaaaataattattagaataagagtgtagtatcatagataactctcttctataaaaatggattttattcgtagaaagtatcttatatacacagtagaaaataatatagattttttaaaggatgatacattaagtaaagtaaacaattttaccctcaatcatgtactagctctcaagtatctagttagcaattttcctcaacacgttattactaaggatgtattagctaataccaatttttttgttttcatacatatggtacgatgttgtaaagtgtacgaagcggttttacgacacgcatttgatgcacccacgttgtacgttaaagcattgactaagaattatttatcgtttagtaacgcaatacaatcgtacaaggaaaccgtgcataaactaacacaagatgaaaaatttttagaggttgccgaatacatggacgaattaggagaacttataggcgtaaattatgacttagttcttaatccattatttcacggaggggaacccatcaaagatatggaaatcatttttttaaaactgtttaagaaaacagacttcaaagttgttaaaaaattaagtgttataagattacttatttgggcatacctaagcaagaaagatacaggcatagagtttgcggataatgatagacaaaatatatacactctatttcaacaaactggtagaatcgtccatagcaatctaacagaaacgtttagagattatatctttcccggagataagactagctattgggtgtggttaaacgaaagtatagctaatgatgcggatatcgttcttaatagacacgccattaccatgtatgataaaattcttagttatatatactctgagataaaacaaggacgcgttaataaaaacatgcttaagttagtttatatctttgagcctgaaaaagatatcagagaacttctgctagaaatcatatatgatattcctggagatatcctatctattattgatgcaaaaaacgacgattggaaaaaatattttattagtttttataaagctaattttattaacggtaatacatttattagtgatagaacgtttaacgaggacttattcagagttgttgttcaaatagatcccgaatatttcgataatgaacgaattatgtctttattctctacgagtgctgcggacattaaacgatttgatgagttagatattaataacagttatatatctaatataatttatgaggtgaacgatatcacattagatacaatggatgatatgaagaagtgtcaaatctttaacgaggatacgtcgtattatgttaaggaatacaatacatacctgtttttgcacgagtcggatcccatggtcatagagaacggaatactaaagaaactgtcatctataaaatccaagagtagacggctgaacttgtttagcaaaaacattttaaaatattatttagacggacaattggctcgtctaggtcttgtgttagatgattataaaggagacttgttagttaaaatgataaaccatcttaagtctgtggaggatgtatccgcattcgttcgattttctacagataaaaaccctagtattcttccatcgctaatcaaaactattttagctagttataatatttccatcatcgtcttatttcaaaggtttttgagagataatctatatcatgtagaagaattcttggataaaagcatccatctaaccaagacggataagaaatatatacttcaattgataagacacggtagatcatagaacagaccaaatatattattaataatttgtatatacatagatataattatcacacatttttgataaatgggaactgctgcaacaattcagactcccaccaaattaatgaataaagaaaatgcagaaatgattttggaaaaaattgttgatcatatagttatgtatattagtgacgaatcaagtgattcagaaaataatcctgaatatattgattttcgtaacagatacgaagactatagatctctcattataaaaagtgatcacgagtttgtaaagctatgtaaaaatcatgcggagaaaagttctccagaaacgcaacaaatgattatcaaacacatatacgaacaatatcttattccagtatctgaagtactattaaaacctataatgtccatgggtgacataattacatataacggatgtaaagacaatgaatggatgctagaacaactctctaccctaaactttaacaatctccgcacatggaactcatgtagcataggcaatgtaacgcgtctgttttatacattttttagttatctgatgaaagataaactaaatatataagtataatcccattctaatactttaacctgatgtattagcatcttattagaatattaacctaactaaaagacataacataaaaactcattacatagttgataaaaagcggtaggatataaatattatggctgccaccgttccgcgttttgacgacgtgtacaaaaatgcacaaagaagaattctagatcaagaaacattttttagtagaggtctaagtagaccgttaatgaaaaacacatatctatttgataattacgcgtatggatggataccagaaactgcaatttggagtagtagatacgcaaacctagatgctagtgactattatcccatttcgttgggattacttaaaaagttcgagtttctcatgtctctatataaaggtcctattcccgtatatgaagaaaaagtaaatactgaattcatagccaatggatcgttctctggtagatacgtatcatatcttcgaaagttttctgcccttccaacaaacgagtttattagttttttgttactgacttccattccaatctataatatcttgttctggtttaaaaacacacagtttgatattactaaacacacattattcagatacgtctatacagataatgccaaacacctggcgttggctaggtatatgcatcaaacaggagactataagcctttgtttagtcgtctcaaagagaattatatatttaccggtcccgttccaataagtatcaaagatatagatcaccctaatcttagtagagcaagaagtccatccgattatgagacattagctaatattagtactatattgtactttaccaagtatgatccggtattaatgtttttattgttttacgtacctgggtattcaattactacaaaaattactccagccgtagaatatctaatggataaactgaatctaacaaagagcgacgtacaactgttgtaaattattttatgcttcgtaaaatgtaggttttgaaccaaacattctttcaaagaatgagatgcataaaactttattatccaatagattgactatttcggacgtcaatcgtttaaagtaaacttcgtaaaatattctttgatcactgccgagtttaaaacttctatcgataattgtctcatatgttttaatatttacaagttttttggtccatggtacattagccggacaaatatatgcaaaataatatcgttctccaagttctatagtttctggattatttttattatattcagtaactaaatacatattagggttatctgcggatttataatttgagtgatgcattctactcaacataaataattctagaggagacgatctactatcaaattcggatcgtaaatctgtttctaaagaacggagaatatctatacatacctgattagaattcatccgtccttcagacaacatctcagacagtctggttttgtacatcttaatcatattcttatgaaacttggaaacatctcttctagtttcactagtacctttattaattctctcaggtacagattttgaattcgacgatgctgagtatttcatcgttgtatatttcttcttcgattgcataatcagattcttatataccgcctcaaactctattttaaaattattaaacaatactctattattaatcagtcgttctaactctttcgctatttctatagacttatctacatcttgactgtctatctctgtaaacacggagtcggtatctccatacacgctacgaaaacgaaatctgtaatctataggcaacgatgttttcacaatcggattaatatctctatcgtccatataaaatggattacttaatggattggcaaaccgtaacataccgttagataactctgctccatttagtaccgattctagatacaagatcattctacgtcctatggatgtgcaactcttagccgaagcgtatgagtatagagcactatttctaaatcccatcagaccatatactgagttggctactatcttgtacgtatattgcatggaatcatagatggccttttcagttgaactggtagcctgttttagcatctttttatatctggctctctctgccaaaaatgttcttaatagtctaggaatggttccttctatcgatctatcgaaaattgctatttcagagatgaggttcggtagtctaggttcacaatgaaccgtaatatatctaggaggtggatatttctgaagcaatagctgattatttatttcttcttccaatctattggtactaacaacgacaccgactaatgtttccggagatagatttccaaagatacacacattaggatacagactgttataatcaaagattaatacattattactaaacattttttgttttggagcaaataccttaccgccttcataaggaaacttttgttttgtttctgatctaactaagatagttttagtttccaacaatagctttaacagtggacccttgatgactgtactcgctctatattcgaataccatggattgaggaagcacatatgttgacgcacccgcgtctgtttttgtttctactccataatactcccacaaatactgacacaaacaagcatcatgaatacagtatctagccatatctaaagctatgtttagattataatccttatacatctgagctaaatcaacgtcatcctttccgaaagataatttatatgtatcattaggtaaagtaggacataatagtacgactttaaatccattttcccaaatatctttacgaattactttacatataatatcctcatcaacagtcacataattacctgtggttaaaacctttgcaaatgcagcggctttgcctttcgcgtctgtagtatcgtcaccgatgaacgtcatttctctaactcctctatttaatactttacccatgcaactgaacgcgttcttggatatagaatccaatttgtacgaatccaatttttcaaatttttgaatgaatgaatatagatcgaaaaatatagttccattattgttattaacgtgaaacgtagtattggccatgccgcctactcccttatgactagactgatttctctcataaatacagagatgtacagcttcctttttgtccggagatctaaagataattttctctcctgttaataactctagacgattagtaatatatctcagatcaaagttatgtccgttaaaggtaacgacgtagtcgaacgttagttccaacaattgtttagctattcgtaacaaaactatttcagaacatagaactagttctcgttcgtaatccatttccattagtgactgtatcctcaaacatcctctatcgacggcttcttgtatttcctgttccgttaacatctcttcattaatgagcgtaaacaataatcgtttaccacttaaatcgatataacagtaacttgtatgcgagattgggttaataaatacagaaggaaacttcttatcgaagtgacactctatatctagaaataagtacgatcttgggatatcgaatctaggtatttttttagcgaaacagttacgtggatcgtcacaatgataacatccattgttaatctttgtcaaatattgctcgtccaacgagtaacatccgtctggagatatcccgttagaaatataaaaccaactaatattgagaaattcatccatggtggcattttgtatgctgcgtttctttggctcttctatcaaccacatatctgcgacggagcattttctatctttaatatctagattataacttattgtctcgtcaatgtctatagttctcatctttcccaacggcctcgcattaaatggaggaggagacaatgactgatatatttcgtccgtcactacgtaataaaagtaatgaggaaatcgtataaatacggtctcgccatttcgacatctggatttcagatataaaaatctgttttcaccgtgactttcaaaccaattaatgcaccgaacatccatttatagaatttagaaatatattttcatttaaatgaatcccaaacattggggaagagccgtatggaccattatttttatagtactttcgcaagcgggtttagacggcaacatagaagcgtgtaaacgaaaactatatactatagttagcactcttccatgtcctgcatgtagacggcacgcgactatcgctatagaggacaataatgtcatgtctagcgatgatctgaattatatttattattttttcatcagattatttaacaatttggcatctgatcccaaatacgcgatcgatgtgacaaaggttaaccctttataaacttaacccattataaaacttatgattagtcacaactgaaataaccgcgtgattattttttggtataattctacacggcatggtttctgtgactatgaattcaacccccgttacattagtgaaatctttaacaaacagcaagggttcgtcaaagacataaaactcattgtttacaatcgaaatagaccccctatcacacttaaaataaaaaatatccttatcctttaccaccaaataaaattctgattggtcaatgtgaatgtattcacttaacagttccacaaatttatttattaactccgaggcacatacatcgtcggtattttttatggcaaactttactcttccagcatccgtttctaaaaaaatattaacgagttccatttatatcatccaatattattgaaatgacgttgatggacagatgatacaaataagaaggtacggtacctttgtccaccatctcctccaattcatgctctattttgtcattaactttaatgtatgaaaacagtacgccacatgcttccatgacagtgtgtaacactttggatacaaaatgtttgacattagtataattgtccaagactgtcaatctataatagatagtagctataatatattctatgatggtattgaagaagatgacaaccttggcatattgatcatttaacacagacatggtatcaacagatagcttgaatgaaagagaatcagtaattggaataagcgtcttctcgatagagtgtccgtataccaacatgtctgatattttgatgtattccattaaattatttagttttttctttttattctcgttaaacagcatttctgtcaacggaccccaacatcgttgaccgattaagttttgattgatttttccgtgtaaggcgtatctagtcagatcgtatagcctatccaataatccatcgtctgtgtgtagatcacatcgtacactttttaattctctatagaagagcgacagacatctggagcaattacagacagcaatttctttattctctacagatgtaagatacttgaagacattcctatgatgatgcagaattttggataacacggtattgatggtatctgttaccataattcctttgatggctgatagtgtcagagcacaagatttccaatctttgacaatttttagcaccattatctttgttttgatatctatatcagacagcatggtgcgtctgacaacacagggattaagacggaaagatgaaatgattctctcaacatcttcaatagataccttgctattttttctggcattatctatatgtgcgagaatatcctctagagaatcagtatcctttttgatgatagtggatctcaatgacatgggacgtttaaaccttcttattctatcaccagattgcatggtgatttgtcttctttcttttatcataatgtaatctctaaattcatcggcaaattgtctatatctaaaatcataatatgagatgtttacctctacaaatatctgttcgtccaatgttagagtatttacatcagttttgtattccaaattaaacatggcaacggatttaattttatattcctctattaagtcctcgtcgataataacagaatgtagataatcatttaatccgtcgtacatggttggaagatgcttgttgacaaaatctttaattgtcttgatgaaggtgggactatatctaacatcttgattaataaaatttataacattgtccataggatactttgtaactagttttatacacatctcttcatcggtaagtttagacagaatatcgtgaacaggtggtatattatattcatcagatatacgaagaacaatgtccaaatctatattgtttaatatattatatagatgtagcgtagctcctacaggaatatctttaactaagtcaatgatttcatcaaccgttagatctattttaaagttaatcatataggcattgatttttaaaaggtatgtagccttgactacattctcattaattaaccattccaagtcattgtgtgtaagaagattatattctatcataagcttgactacatttggtcccgataccattaaagaattcttatgatataaggaaacagattttaggtactcatctactctacaagaattttggagagccttaacgatatcagtgacgtttattatttcaggaggaaagaatctaacattgagaatatcggaattaatagcttccagatacagtgattttggcaatagtccgtgtaatccataatccagtaacacgagctggtgcttgctagacaccttttcaatgtttaatttttttgaaataagctttgataaagccttcctcgcaaattccggatacatgaacatgtcggcgacatgattaagtattgttttttcattatttttatattttctcaacaagttctcaataccccaatagatgatagaatatcacccaatgcgtccatgttgtctatttccaacaggtcgctatatccaccaatagaagtttttccaaaaaagattctaggaacagttctaccaccagtaatttgttcaaaataatcccgcaattcattttcgggtttaaattctttaatatcgacaatttcatacgctcctcttttgaaactaaacttatttagaatatccagtgcatttctacaaaaaggacatgtatacttgacaaaaattgtcactttgttattggccaacctttgttgtacaaattcctcggccattttaatatttaagtgatataaaactatctcgacttatttaactctttagtcgagatatatggacgcagatagctatatgatagccaactacagaaggcaaacgctataaaaaacataattacgacgagcatatttataaatatttttattcagcattacttgatatagtaatattaggcacagtcaaacattcaaccactctcgatacattaactctctcattttctttaacaaattctgcaatatcttcgtaaaaagattcttgaaactttttagaatatctatcgactctagatgaaatagcgttcgtcaacatactatgttttgtatacataaaggcgcccattttaacagtttctagtgacaaaatgctagcgatcctaggatcctttagaatcacatagattgacgattcgtctctcttagtaactctagtaaaataatcatacaatctagtacgcgaaataatattatccttgacttgaggagatctaaacaatctagttttgagaacatcgataagttcatcgggaatgacatacatactatctttaatagaactcttttcatccagttgaatggattcgtccttaaccaactgattaatgagatcttctattttatcattttccagatgatatgtatgtccattaaagttaaattgtgtagcgcttctttttagtctagcagccaatactttaacatcactaatatcgatatacaaaggagatgatttatctatggcattaagaattcgtttttcgacatccgtcaaaaccaattcctttttgcctgtatcatccagttttccatcctttgtaaagaaattattttctactagactattaataagactgataaggattcctccataattgcacaatccaaactttttaacaaaactagactttacgagatctacaggaatgcgtacttcaggttttttagcttgtgattttttcttttgcggacattttctagtaaccaactcatctaccatttcattgattttagcagtgaaataagctttcaatgcacgggcactgatactattgaaaacgagttgatcttcaaattccgccatttaagttcaccaaacaacttttaaatacaaatatatcaatagtagtagaataagaactataaaaaaaataataattaaccaaccccaacaaccggtattattagttgatgtggtagttttctcatcacttagaacagatttaacaatttctataaagtctgtcaaatcatcttccggagaccccataaatacaccaaatatagcggcgtacaacttatccatttatacattgaatattggcttttctttatcgctatcttcatcatattcatcatcaatatcaacaagtcccagattacgagccagatcttcttctacattttcagtcattgatacacgttcactatctccagagagtccgataacgttagccaccacttctctatcaatgattagtttcttgagcgcgaaagtaatttttgtttccgttccggatctatagaagacgataggtgtgataattgccttggccaattgtctttctcttttactgagtgattctagttcaccttctatagatctgagaatggatgattctccagtcgaaacatattctaccatggatccgtttaatttgttgatgaagatggattcatccttaaatgttttctctgtaatagtttccaccgaaagactatgcaaagaatttggaatgcgttccttgtgcttaatgtttccatagacggcttctagaagttgatacaacataggactagccgcggtaacttttatttttagaaagtatccatcgcttctatcttgtttagatttatttttataaagtttagtctctccttccaacataataaaagtggaagtcatttgactagataaactatcagtaagttttatagagatagacgaacaattagcgtattgagaagcatttagtgtaacgtattcgatacattttgcattagatttactaatcgattttgcatactctataacacccgcacaagtctgtagagaatcgctagatgcagtaggtcttggtgaagtttcaactctcttcttgattaccttactcatgattaaacctaaataattgtactttgtaatataatgatatatattttcactttatctcatttgagaataaaaatgtttttgtttaaccactgcatgatgtacagatttcggaatcgcaaaccaccagtggttttattttatccttgtccaatgtgaattgaatgggagcggatgcgggtttcgtacgtagatagtacattcccgtttttagaccgagactccatccgtaaaaatgcatactcgttagtttggaataactcggatctgctatatggatattcatagattgactttgatcgatgaaggctcccctgtctgcagccatttttatgatcgtcttttgtggaatttcccaaatagttttataaactcgcttaatatcttctggaaggtttgtattctgaatggatccaccatctgccataatcctattcttgatctcatcattccataattttctctcggttaaaactctaaggagatgcggattaactacttgaaattctccagacaatactctccgagtgtaaatattactggtatacggttccaccgactcattatttcccaaaatttgagcagttgatgcagtcggcataggtgccaccaataaactatttctaagaccgtatgttctgattttatcttttagaggttcccaattccaaagatccgacggtacaacattccaaagatcatattgtagaataccgttactggcgtacgatcctacatatgtatcgtatggtccttccttctcagctagttcacaactcgcctctaatgcaccgtaataaatggtttcgaagatcttcttatttagatcttgtgcttccaggctatcaaatggataatttaagagaataaacgcgtccgctaatccttgaacaccaataccgataggtctatgtctcttattagagatttcagcttctggaataggataataattaatatctataattttattgagatttctgacaattactttgaccacatccttcagtttgagaaaatcaaatcgcccatctattacaaacatgttcaaggcaacagatgccagattacaaacggctacctcattagcatccgcatattgtattatctcagtgcaaagattactacacttgatagttcctaaattttgttgattactctttttgttacacgcatccttataaagaatgaatggagtaccagtttcaatctgagattctataatcgctttccagacgactcgagcctttattatagatttgtatctcctttctctttcgtatagtgtatacaatcgttcgaactcgtctccccaaacattgtccaatccaggacattcatccggacacatcaacgaccactctccgtcatccttcactcgtttcataaagagatcaggaatccaaagagctataaatagatctctggttctatgttcctcgtttcctgtattctttttaagatcgaggaacgccataatatcagaatgccacggttccaagtatatggccataactccaggccgtttgtttcctccctgatctatgtatctagcggtgttattataaactctcaacattggaataataccgtttgatataccattggtaccggagatatagcttccactggcacgaatattactaattgatagacctattccccctgccattttagagattaatgcgcatcgttttaacgtgtcatagataccctctatgctatcatcgatcatgttaagtagaaaacagctagacatttggtgacgactagttcccgcattaaataaggtaggagaagcgtgcgtaaaccatttttcagaaagtagattgtacgtctcaatagctgagtctatatcccattgatgaattcctactgcgacacgcattaacatgtgctgaggtctttcaacgatcttgttgtttattttcaacaagtaggatttttccaaagttttaaaaccaaaatagttgtatgaaaagtctcgttcgtaaataataaccgagttgagtttatccttatatttgttaactatatccatggtgatacttgaaataatcggagaatgtttcccatttttaggattaacatagttgaataaatcctccatcacttcactaaatagtttttttgtttccttgtgtagatttgatacggctattctggcggctagaatggcataatccggatgttgtgtagtacaagtggctgctatttcggctgccagagtgtccaattctaccgttgttactccattatatattccttgaataaccttcatagctattttaataggatctatatgatccgtgtttaagccataacataattttctaatacgagacgtgattttatcaaacatgacattttccttgtatccatttcgtttaatgacaaacatttttgttggtgtaataaaaaaattatttaacttttcattaatagggatttgacgtatgtagcgtacaaaatgattgttcctggtatatagataaagagtcctatatatttgaaaatcgttacggctcgattaaactttaatgattgcatagtgaatatatcattaggatttaactccttgactatcatggcggcgccagaaattaccatcaaaagcattaatacagttataccgatcgcagttagaacggttatagcatccaccatttatatctaaaaattagatcaaagaatatgtgacaaagtcctagttgtatactgagaattgacgaaacaatgtttcttacatatttttttcttattagtaaccgacttaatagtaggaactggaaaactagacttgattattctataagtatagatacccttccaaataatattctctttgataaaagttccagaaaatgtagaattttttaaaaagttatcttttgctattaccaagattgtgtttagacgcttattattaatatgagtgatgaaatccacaccgcctctagatatcgcctttatttccacattagatggtaaatccaatagtgaaactatctttttaggaatgtatggactcgcgtttagaggagtaaacgtcttaggcgtcggaaaggatgattcatcaaacgaataaacaatttcacaaatggatgttaatgtattagtaggaaattttttgacgctattggaattgaagattctaatggatgatgttctacctatttcatccgataacatgttaatttccgacaccaacggttttaatatttcgatgatatacggtagtctctctttcggacttatatagcttattccacaatacgagtcattatatactccaaaaaacaaaataactagtataaaatctgtatcgaatgggaaaaacgaaattatcgacataggtatagaatccggaacattgaacgtattaatacttaattctttttctgtggtaagtaccgataggttattgacattgtatggttttaaatattctataacttgagacttgatagatattagtgatgaattgaaaattatttttatcaccacgtgtgtttcaggatcatcgtcgacgcccgtcaaccaaccgaacggagtaaaataaatatcattaatatatgctctagatattagtatttttatcaatcctttgattatcatcttctcgtaggcgaatgattccatgatcaagagtgatttaagaacatcctccggagtattaatgggcttagtaaacagtccatcgttgcaataataaaagttatccaagttaaaggatattatgcattcgtttaaagatatcacctcatctgacggagacaattttttggtaggttttagagactttgaagctacttgtttaacaaagttattcatcgtcgtctactattctatttaattttgtagttaatttatcacatatcacattaattgactttttggtccacttttccatacgtttatattcttttaatcctgcgttatccgtttccgttatatccagggatagatcttgcaagttaaatagaatgctcttaaataatgtcattttcttatccgctaaaaatttaaagaatgtataaacctttttcagagatttgaaactcttaggtggtgtcctagtacacaatatcataaacaaactaataaacattccacattcagattccaacagctgattaacttccacattaatacagcctattttcgctccaaatgtacattcgaaaaatctgaataaaacatcgatgtcacaatttgtattatccaatacagaatgtttgtgattcgtgttaaaaccatcggagaaggaatagaaataaaaattattatagtggtggaattcagttggaatattgcctccggagtcataaaaggatactaaacattgttttttatcataaattacacatttccaatgagacaaataacaaaatccaaacattacaaatctagaggtagaacttttaattttgtctttaagtatatacgataagatatgtttattcataaacgcgtcaaatttttcatgaatcgctaaggagtttaagaatctcatgtcaaattgtcctatataatccacttcggatccataagcaaactgagagactaagttcttaatacttcgattgctcatccaggctcctctctcaggctctattttcatcttgacgacctttggattttcaccagtatgtattcctttacgtgataaatcatcgattttcaaatccatttgtgagaagtctatcgccttagatactttttcccgtagtcgaggtttaaaaaaatacgctaacggtatactagtaggtaactcaaagacatcatatatagaatggtaacgcgtctttaactcgtcggttaactctttcttttgatcgagttcgtcgctactattgggtctgctcaggtgccccgactctactagttccaacatcataccgataggaatacaagacactttgccggcggttgtagatttatcatatttttccactacatatccgttacaatttgttaaaaatttagatacatctatattgctacataatccagctagtgaatatatatgacataataaattggtaaatcctagttctggtattttactaattactaaatctgtatatctttccatttatcatggaaaagaatttaccagatatcttcttttttccaaactgcgttaatgtattctcttacaaatattcacaagatgaattcagtaatatgagtaaaacggaacgtgatagtttctcattggccgtgtttccagttataaaacatagatggcataacgcacacgttgtaaaacataaaggaatatacaaagttagtacagaagcacgtggaaaaaaagtatctcctccatcactaggaaaacccgcacacataaacctaaccgcgaagcaatatatatacagtgaacacacaataagctttgaatgttatagttttctaaaatgtataacaaatacagaaatcaattcgttcgatgagtatatattaagaggactattagaagctggtaatagtttacagatattttccaattccgtaggtaaacgaacagatactataggtgtactagggaataagtatccatttagcaaaattccattggcctcattaactcctaaagcacaacgagagatattttcagcgtggatttctcatagacctgtagttttaactggaggaactggagtgggtaagacgtcacaggtacccaagttattgctttggtttaattatttatttggtggattctctactctagataaaatcactgactttcacgaaagaccagtcattctatctcttcctaggatagctttagttagattgcatagcaataccattttaaaatcattgggatttaaggtactagatggatctcctatttctttacggtacggatctataccggaagaattaataaacaaacaaccaaaaaaatatggaattgtattttctacccataagttatctctaacaaaactatttagttatggcactcttattatagacgaagttcatgagcatgatcaaataggagatattattatagcagtagcgagaaagcatcatacgaaaatagattctatgtttttaatgactgccacgttagaggatgacagggaacggctaaaagtatttttacctaatcccgcatttatacatattcctggagatacactgtttaaaattagcgaggtatttattcataataagataaatccatcttccagaatggcatacatagaagaagaaaagagaaatttagttactgctatacagatgtatactcctcctgatggatcatccggtatagtctttgtggcatccgttgcacagtgtcacgaatataaatcatatttagaaaaaagattaccgtatgatatgtatattattcatggtaaggtcttagatatagacgaaatattagaaaaagtgtattcatcacctaatgtatcgataattatttctactccttatttggaatccagcgttactatacgcaatgttacacacatttatgatatgggtagagtttttgtccccgctccttttggaggatcgcaacaatttatttctaaatctatgagagatcaacgaaaaggaagagtaggaagagttaatcctggtacatacgtctatttctatgatctgtcttatatgaagtctatacagcgaatagattcagaatttctacataattatatattgtacgctaataagtttaatctaacactccccgaagatttgtttataatccctacaaatttggatattctatggcgtacaaaggaatatatagactcgttcgatattagtacagaaacatggaataaattattatccaattattatatgaagatgatagagtatgctaaactttatgtactaagtcctattctcgctgaggagttggataactttgagaggacgggagaattaactagtattgtacgagaagccattttatctctaaatttacaaattaagattttaaattttaaacataaagatgatgatacgtatatacacttttgtaaaatattattcggtgtctataacggaacaaacgctactatatattatcatagacctctaacgggatatatgaatatgatttcagatactatatttgttcctgtagataataactaaaaatcaaactctaatgaccacatctttttttagagatgaaaaattttccacatctccttttgtagacacgactaaacattttgcagaaaaaagtttattagtgtttagataatcgtatacttcatcagtgtagatagtaaatgtgaacagataaaaggtattcttgctcaatagattggtaaattccatagaatatattaatcctttcttcttgagatcccacatcatttcaaccagagacgttttatccaatgatttacctcgtactataccacatacaaaactagattttgcagtgacgtcgtacctggtattcctaccaaacaaaattttacttttagttcttttagaaaattctaaggtagaatctctatttgccaatatgtcatctatggaattaccactagcaaaaaatgatagaaatatatattgatacatcgcagctggttttgatctactatactttaaaaacgaatcagattccataattgcctgtatatcatcagctgaaaaactatgttttacacgtattccttcggcatttctttttaatgatatatcttgtttagacaatgataaagttatcatgtccatgagagacgcgtctccgtatcgtataaatatttcattagatgttagacgcttcattaggggtatacttctataaggtttcttaatcagtccatcattggttgcgtcaagaactactatcggatgttgttgggtatctctagtgttacacatggccttactaaagtttgggtaaataactatgatatctctattaattatagatgcatatatttcattcgtcaaggatattagtatcgacttgctatcgtcattaatacgtgtaatgtaatcatataaatcatgcgatagccaaggaaaatttaaatagatgttcatcatataatcgtcgctataattcatattaatacgttgacattgactaatttgtaatatagcctcgccacgaagaaagctctcgtattcagtttcatcgataaaggataccgttaaatataactggttgccgatagtctcatagtctattaagtggtaagtttcgtacaaatacagaatccctaaaatattatctaatgttggattaatctttaccataactgtataaaatggagacggagtcataactattttaccgtttgtacttactggaatagatgaaggaataatctccggacatgctggtaaagacccaaatgtctgtttgaagaaatccaatgttccaggtcctaatctcttaacaaaaattacgatattcgatcccgatatcctttgcattctatttaccagcatatcacgaactatattaagattatctatcatgtctattctcccaccgttatataaatcgcctccgctaagaaacgttagtatatccatacaatggaatacttcatttctaaaatagtattcgttttctaattctttaatgtgaaatcgtatactagaaagggaaaaattatctttgagttttccgttagaaaagaaccacgaaactaatgttctgattgcgtccgattccgttgctgaattaatggatttacaccaaaaactcatataacttctagatgtagaagcattcgctaaaaaattagtagaatcaaaggatataagtagatgttccaacaagtgagcaattcccaagatttcatctatatcattctcgaatccgaaattagaaattcccaagtagatatcctttttcatccgatcgttgatgaaaatacgaactttattcggtaagacaatcatttactaaggagtaaaataggaagtaatgttcgtatgtcgttatcatcgtataaattaaaggtgtgttttttaccattaagtgacattataattttaccaatattggaattataatataggtgtatttgcgcactcgcgacggttgatgcatcggtaaatatagctgtatctaatgttctagtcggtatttcatcatttcgctgtctaataatagcgttttctctatctgtttccattacagctgcctgaagtttattggtcggataatatgtaaaataataagaaatacatacgaataacaaaaataaaataagatataataaagatgccatttagagatctaattttgtttaacttgtccaaattcctacttacagaagatgaggaatcgttggagatagtgtcttccttatgtagaggatttgaaatatcttataatgacttgataacttactttccagataggaaataccataaatatatttataaagtatttgaacatgtagatttatcggaggaattaagtatggaattccatgatacaactctgagagatttagtctatcttagattgtacaagtattccaagtgtatacggccgtgttataaattaggagataatctaaaaggcatagttgttataaaggacaggaatatttatattagggaagcaaatgatgacttgatagaatatctcctcaaggaatacactcctcagatttatacatattctaatgagcgcgtccccataactggttcaaaattaattctttgtggattttctcaagttacatttatggcgtatacaacgtcgcatataacaacaaataaaaaggtagatgttctcgtttccaaaaaatgtatagatgaactagtcgatccaataaattatcaaatacttcaaaatttatttgataaaggaagcggaacaataaacaaaatactcaggaagatattttattcggtaacaggtggccaaactccataggtagctttttctatttcggattttagaatttccaaattcaccagcgatttatcggttttggtgaaatccaaggatttattaatgtccacaaatgccatttgttttgtctgtggattgtatttgaaaatggaaacgatgtagttagatagatgcgctgcgaagtttcctattagggttccgcgcttcacgtcacccagcatacttgaatcaccatcctttaaaaaaaatgataagatatcaacatggagtatatcatactcgaattttaattcttctactgactcactgacattttcacaaatactacaatacggtttaccgaaaataatcagtacgttcttcatttatgggtatcaaaaacttaaaatcgttactgctggaaaataaatcactgacgatattagatgataatttatacaaagtatacaatggaatatttgtggatacaatgagtatttatatagccgtcgccaattgtgtcagaaacttagaagagttaactacggtattcataaaatacgtaaacggatgggtaaaaaagggagggcatgtaaccctttttatcgatagaggaagtataaaaattaaacaagacgttagagacaagagacgtaaatattctaaattaaccaaggacagaaaaatgttagaattagaaaagtgtacatccgaaatacaaaatgttaccggatttatggaagaagaaataaaggcagaaatgcaattaaaaatcgataaactcacatttcaaatatatttatctgattctgataacataaaaatatcattgaatgagatactaacacatttcaacaataatgagaatgttacattattttattgtgatgaacgagacgcagaattcgttatgtgtctcgaggctaaaacacatttctctaccacaggagaatggccgttgataataagtaccgatcaggatactatgctatttgcatctgctgataatcatcctaagatgataaaaaacttaactcaactgtttaaatttgttccctcggcagaggataactatttagcaaaattaacggcgttagtgaatggatgtgatttctttcctggactctatggggcatctataacacccaccaacttaaacaaaatacaattgtttagtgattttacaatcgataatatagtcactagtttggcaattaaaaattattatagaaagactaactctaccgtagacgtgcgtaatattgttacgtttataaacgattacgctaatttagacgatgtctactcgtatattcctccttgtcaatgcactgttcaagaatttatattttccgcattagatgaaaaatggaatgaatttaaatcatcttatttagaaagcgtgccgttaccctgccaattaatgtacgcgttagaaccacgcaaggagattgatgtttcagaagttaaaactttatcatcttatatagatttcgaaaatactaaatcagatatcgatgttataaaatctatatcctcgatcttcggatattctaacgaaaactgtaacacgatagtattcggcatctataaggataatttactactgagtataaataattcattttactttaacgatagtctgttaataaccaatactaaaagtgataatataataaatataggttactagattaaaaatggtgttccaactcgtgtgctctacatgcggtaaagatatttctcacgaacgatataaattgattatacgaaaaaaatcattaaaggatgtactcgtcagtgtaaagaacgaatgttgtaggttaaaattatctacacaaatagaacctcaacgtaacttaacagtgcaacctctattggatataaactaatatggatccggttaattttatcaagacatatgcgcctagaggttctattatttttattaattataccatgtcattaacaagtcatttgaatccatcgatagaaaaacatgtgggtatttattatggtacgttattatcggaacacttggtagttgaatctacctatagaaaaggagttcgaatagtcccattggatagtttttttgaaggatatcttagtgcaaaagtatacatgttagagaatattcaagttatgaaaatagcagctgatacgtcattaactttattgggtattccgtatggatttggtcatgatagaatgtattgttttaaattggtagctgactgttataaaaatgccggtattgatacatcgtctaaacgaatattgggcaaagatatttttctgagccaaaacttcacagacgataatagatggataaagatatatgattctaataatttaacattttggcaaattgattaccttaaagggtgagttaatatgcataactactcctccgttgttttttccctcgttctttttcttaacgttgtttgccatcactctcataatgtaaagatattctaaaatggtaaacttttgcatatcggacgcagaaattggtataaatgttgtaattgtattatttcccgtcaatggactagtcacagctccatcagttttatatcctttagagtatttctcactcgtgtctaacattctagagcattccatgatctgtttatcgttgatattggccggaaagatagattttttattttttattatattactattggcaattgtagatataacttctggtaaatatttttctaccttttcaatctcttctattttcaagccggctatatattctgctatattgttgctagtatcaataccttttctggctaagaagtcatatgtggtattcactatatcagttttaactggtagttccattagcctttccacttctgcagaataatcagaaattggttctttaccagaaaatccagctactataataggctcaccgatgatcattggcaaaatcctatattgtaccagattaatgagagcatatttcatttccaataattctgctagttcttgagacattgatttatttgatgaatctagttggttctctagatactctaccatttctgccgcatacaataacttgttagataaaatcagggttatcaaagtgtttagcgtggctagaatagtgggcttgcatgtattaaagaatgcggtagtatgagtaaaccgttttaacgaattatatagtctccagaaatctgtggcgttacatacatgagccgaatgacatcgaagattgtccaatatttttaatagctgctctttgtccattatttctatatttgactcgcaacaattgtagataccattaatcaccgattcctttttcgatgccggacaatagcacaattgtttagctttggactctatgtattcagaattaatagatatatctctcaatacagattgcactatacattttgaaactatgtcaaaaattgtagaacgacgctgttctgcagccatttaactttaaataatttacaaaaatttaaaatgagcatccgtataaaaatcgataaactgcgccaaattgtggcatatttttcagagttcagtgaagaagtgtctataaatgtagactcgacggatgagttaatgtatatttttgccgccttgggcggatctgtaaacatttgggcaattatacctctaagtgcatcagtgttttaccgaggagccgaaaatattgtgtttaatcttcctgtgtccaaggtaaaatcgtgtttgtgtagttttcacaatgatgccatcatagatatagaacctgatctggaaaataatctagtaaaactttctagttatcatgtagtaagtgtcgattgtaacaaggaactgatgcctattaggacagatactactatttgtctaagtatagatcaaaagaaatcttacgtgtttaattttcacaagtatgaagaaaaatgttgtggtagaaccgtcattcatctagaatggttgttgggctttatcaagtgtattagtcagcatcagcatctggctattatgtttaaagatgacaatattattatgaagactcctggtaatactgatgcgttttccagggaatattctatgactgaatgttctcaagaactacaaaagttttctttcaaaatagctatctcgtctctcaacaaactacgaggattcaaaaagagagtcaatgtttttgaaactagaatcgtaatggataatgacgataacattttaggaatgttgttttcggatagagttcaatcctttaagatcaacatctttatggcgtttttagattaatactttcaatgagataaatatgggtggcggagtaagtgttgagctccctaaacgggatccgcctccgggagtacccactgatgagatgttattaaacgtggataaaatgcatgacgtgatagctcccgctaagcttttagaatatgtgcatataggaccactagcaaaagataaagaggataaagtaaagaaaagatatccagagtttagattagtcaacacaggacccggtggtctttcggcattgttaagacaatcgtataatggaaccgcacccaattgctgtcgcacttttaatcgtactcattattggaagaaggatggaaagatatcagataagtatgaagagggtgcagtattagaatcgtgttggccagacgttcacgacactggaaaatgcgatgttgatttattcgactggtgtcagggggatacgttcgatagaaacatatgccatcagtggatcggttcagcctttaataggagtaatagaactgtagagggtcaacaatcgttaataaatctgtataataagatgcaaacattatgtagtaaagatgctagtgtaccaatatgcgaatcatttttgcattatttacgcgcacacaatacagaagatagcaaagagatgatcgattatattctaagacaacagtctgcggactttaaacagaaatatatgagatgtagttatcccactagagataagttagaagagtcattaaaatatgcggaacctcgagaatgttgggatccagagtgttcgaatgccaatgttaatttcttactaacacgtaattataataatttaggactttgcaatattgtacgatgtaataccagcgtgaacaacttacagatggataaaacttcctcattaagattgtcatgtggattaagcaatagtgatagattttctactgttcccgtcaatagagcaaaagtagttcaacataatattaaacactcgttcgacctaaaattgcatttgatcagtttattatctctcttggtaatatggatactaattgtagctatttaaatgggtgccgcggcaagcatacagacgacggtgaatacactcagcgaacgtatctcgtctaaattagaacaagaagcgaacgctagtgctcaaacaaaatgtgatatagaaatcggaaatttttatatccgacaaaaccatggatgtaacctcactgttaaaaatatgtgctctgcggacgcggatgctcagttggatgctgtgttatcagccgctacagaaacatatagtggattaacaccggaacaaaaagcatacgtgccagctatgtttactgctgcgttaaacattcagacgagtgtaaacactgttgttagagattttgaaaattatgtgaaacagacttgtaattctagcgcggtcgtcgataacaaattaaagatacaaaacgtaatcatagatgaatgttacggagccccaggatctccaacaaatttggaatttattaatacaggatctagcaaaggaaattgtgccattaaagcgttgatgcaattgacgactaaggccactactcaaatagcacctagacaagttgctggtacaggagttcagttttatatgattgttatcggtgttataatattggcagcgttgtttatgtactatgccaagcgtatgttgttcacatccaccaatgataaaatcaaacttattttagccaataaggaaaacgtccattggactacttacatggacacattctttagaacttctccgatggttattgctaccacggatatgcaaaactgaaaatatattgataatattttaatagattaacatggaagttatcgctgatcgtctagacgatatagtgaaacaaaatatagcggatgaaaaatttgtagattttgttatacacggtctagagcatcaatgtcctgctatacttcgaccattaattaggttgtttattgatatactattatttgttatagtaatttatatttttacggtacgtctagtaagtagaaattatcaaatgttgttggtggtgctagtcatcacattaactattttttattactttatactataatagtactagactgacttctaacaaacatctcacctgccataaataaatgcttgatattaaagtcttctatttctaacactattccatctgtggaaaataatactctgacattatcgctaattgacacatcggtgagtgatatgcctataaagtaataatcttctttgggcacatataccagtgtaccaggttctaacaacctatttactggtgctcctgtagcatactttttctttaccttgagaatatccatcgtttgcttggtcaatagcgatatgtgattttttatcaaccactcaaaaaagtaattggagtgttcatatcctctacgggctattgtctcatggccgtgtatgaaatttaagtaacacgactgtggtagatttgttctatagagccgattgccgcaaatagatagaactaccaatatgtctgtacaaatgttaaacattaattgattaacagaaaaaacaatgttcgttctgggaatagaaaccagatcaaaacaaaattcgttagaatatatgccacgtttatacatggaatataaaataactacagtttgaaaaataacagtatcatttaaacatttaacttgcggggttaatctcacaactttactgtttttgaactgttcaaaatatagcatcgatccgtgagaaatacgtttagccgcctttaatagaggaaatcccaccgcctttctggatctcaccaacgacgatagttctgaccagcaactcatttcttcatcatccacctgttttaacatataataggcaggagatagatatccgtcattgcaatattccttctcgtaggcacacaatctaatattgataaaatctccattctcttctctgcatttattatcttgtctcggtggctgattaggctgtggtcttggtttaggccttggtctatcgttgttgaatctattttggtcattaaatctttcatttcttcctggtatatttctatcacctcgtttggttggatttttgtctatattatcgtttgtaacatcggtacgggtattcatttatcacaaaaaaaacttctctaaatgagtctactgctagaaaacctcatcgaagaagataccatattttttgcaggaagtatatctgagtatgatgatttacaaatggttattgccggcgcaaaatccaaatttccaagatctatgctttctatttttaatatagtacctagaacgatgtcaaaatatgagttggagttgattcataacgaaaatatcacaggagcaatgtttaccacaatgtataatataagaaacaatttgggtctaggagatgataaactaactattgaagccattgaaaactatttcttggatcctaacaatgaagttatgcctcttattattaataatacggatatgactgccgtcattcctaaaaaaagtggtaggagaaagaataagaacatggttatcttccgtcaaggatcatcacctatcttgtgcattttcgaaactcgtaaaaagattaatatttataaagaaaatatggaatccgcgtcgactgagtatacacctatcggagacaacaaggctttgatatctaaatatgcgggaattaatgtcctgaatgtgtattctccttccacatccataagattgaatgccatttacggattcaccaataaaaataaactagagaaacttagtactaataaggaactagaatcgtatagttctagccctcttcaagaacccattaggttaaatgattttctgggactattggaatgtgttaaaaagaatattcctctaacagatattccgacaaaggattgattactataaatggagaatgttcctaatgtatactttaatcctgtgtttatagagcccacgtttaaacattctttattaagtgtttataaacacagattaatagttttatttgaagtattcgttgtattcattctaatatatgtattttttagatctgaattaaatatgttcttcatgcctaaacgaaaaatacccgatcctattgatagattacgacgtgctaatctagcgtgtgaagacgataaattaatgatctatggattaccatggatgacaactcaaacatctgcgttatcaataaatagtaaaccgatagtgtataaagattgtgcaaagcttttgcgatcaataaatggatcacaaccagtatctcttaacgatgttcttcgcagatgatgattcattttttaagtatttggctagtcaagatgatgaatcttcattatctgatatattgcaaatcactcaatatctagactttctgttattattattgatccaatcaaaaaataaattagaagctgtgggtcattgttatgaatctctttcagaggaatacagacaattgacaaaattcacagactttcaagattttaaaaaactgtttaacaaggtccctattgttacagatggaagggtcaaacttaataaaggatatttgttcgactttgtgattagtttgatgcgattcaaaaaagaatcctctctagctaccaccgcaatagatcctgttagatacatagatcctcgtcgcaatatcgcattttctaacgtgatggatatattaaagtcgaataaagtgaacaataattaattctttattgtcatcatgaacggcggacatattcagttgataatcggccccatgttttcaggtaaaagtacagaattaattagacgagttagacgttatcaaatagctcaatataaatgcgtgactataaaatattctaacgataatagatacggaacgggactatggacgcatgataagaataattttgaagcattggaagcaactaaactatgtgatgtcttggaatcaattacagatttctccgtgataggtatcgatgaaggacagttctttccagacattgttgaattagatcgataaaaattaattaattacccgggtaccaggcctagatctgtcgagatccggtggtggtgcaaatcaaagaactgctcctcagtggatgttgcctttacttctaggcctgtacggaagtgttacttctgctctaaaagctgctgcagggggggggggggggtgggggggccggttagggccgccatcccctcagagcgtcgggatatcgggtggcggctcgggacggaggacgcgctagtgttcttctgtgtggcagttcagaatgatggatcaagctagatcagcattctctaacttgtttggtggagaaccattgtcatatacccggttcagcctggctcggcaagtagatggcgataacagtcatgtggagatgaaacttgctgtagatgaagaagaaaatgctgacaataacacaaaggccaatgtcacaaaaccaaaaaggtgtagtggaagtatctgctatgggactattgctgtgatcgtctttttcttgattggatttatgattggctacttgggctattgtaaaggggtagaaccaaaaactgagtgtgagagactggcaggaaccgagtctccagtgagggaggagccaggagaggacttccctgcagcacgtcgcttatattgggatgacctgaagagaaagttgtcggagaaactggacagcacagacttcaccagcaccatcaagctgctgaatgaaaattcatatgtccctcgtgaggctggatctcaaaaagatgaaaatcttgcgttgtatgttgaaaatcaatttcgtgaatttaaactcagcaaagtctggcgtgatcaacattttgttaagattcaggtcaaagacagcgctcaaaactcggtgatcatagttgataagaacggtagacttgtttacctggtggagaatcctgggggttatgtggcgtatagtaaggctgcaacagttactggtaaactggtccatgctaattttggtactaaaaaagattttgaggatttatacactcctgtgaatggatctatagtgattgtcagagcagggaaaatcacctttgcagaaaaggttgcaaatgctgaaagcttaaatgcaattggtgtgttgatatacatggaccagactaaatttcccattgttaacgcagaactttcattctttggacatgctcatctggggacaggtgacccttacacacctggattcccttccttcaatcacactcagtttccaccatctcggtcatcaggattgcctaatatacctgtccagacaatctccagagctgctgcagaaaagctgtttgggaatatggaaggagactgtccctctgactggaaaacagactctacatgtaggatggtaacctcagaaagcaagaatgtgaagctcactgtgagcaatgtgctgaaagagataaaaattcttaacatctttggagttattaaaggctttgtagaaccagatcactatgttgtagttggggcccagagagatgcatggggccctggagctgcaaaatccggtgtaggcacagctctcctattgaaacttgcccagatgttctcagatatggtcttaaaagatgggtttcagcccagcagaagcattatctttgccagttggagtgctggagactttggatcggttggtgccactgaatggctagagggatacctttcgtccctgcatttaaaggctttcacttatattaatctggataaagcggttcttggtaccagcaacttcaaggtttctgccagcccactgttgtatacgcttattgagaaaacaatgcaaaatgtgaagcatccggttactgggcaatttctatatcaggacagcaactgggccagcaaagttgagaaactcactttagacaatgctgctttccctttccttgcatattctggaatcccagcagtttctttctgtttttgcgaggacacagattatccttatttgggtaccaccatggacacctataaggaactgattgagaggattcctgagttgaacaaagtggcacgagcagctgcagaggtcgctggtcagttcgtgattaaactaacccatgatgttgaattgaacctggactatgagaggtacaacagccaactgctttcatttgtgagggatctgaaccaatacagagcagacataaaggaaatgggcctgagtttacagtggctgtattctgctcgtggagacttcttccgtgctacttccagactaacaacagatttcgggaatgctgagaaaacagacagatttgtcatgaagaaactcaatgatcgtgtcatgagagtggagtatcacttcctctctccctacgtatctccaaaagagtctcctttccgacatgtcttctggggctccggctctcacacgctgccagctttactggagaacttgaaactgcgtaaacaaaataacggtgcttttaatgaaacgctgttcagaaaccagttggctctagctacttggactattcagggagctgcaaatgccctctctggtgacgtttgggacattgacaatgagttttaaatgtgatacccatagcttccatgagaacagcagggtagtctggtttctagacttgtgctgatcgtgctaaattttcagtagggctacaaaacctgatgttaaaattccatcccatcatcttggtactactagatgtctttaggcagcagcttttaatacagggtagataacctgtacttcaagttaaagtgaataaccacttaaaaaatgtccatgatggaatattcccctatctctagaattttaagtgctttgtaatgggaactgcctctttcctgttgttgttaatgaaaatgtcagaaaccagttatgtgaatgatctctctgaatcctaagggctggtctctgctgaaggttgtaagtggtcgcttactttgagtgatcctccaacttcatttgatgctaaataggagataccaggttgaaagaccttctccaaatgagatctaagcctttccataaggaatgtagctggtttcctcattcctgaaagaaacagttaactttcagaagagatgggcttgttttcttgccaatgaggtctgaaatggaggtccttctgctggataaaatgaggttcaactgttgattgcaggaataaggccttaatatgttaacctcagtgtcatttatgaaaagaggggaccagaagccaaagacttagtatattttcttttcctctgtcccttcccccataagcctccatttagttctttgttatttttgtttcttccaaagcacattgaaagagaaccagtttcaggtgtttagttgcagactcagtttgtcagactttaaagaataatatgctgccaaattttggccaaagtgttaatcttaggggagagctttctgtccttttggcactgagatatttattgtttatttatcagtgacagagttcactataaatggtgtttttttaatagaatataattatcggaagcagtgccttccataattatgacagttatactgtcggttttttttaaataaaagcagcatctgctaataaaacccaacagatactggaagttttgcatttatggtcaacacttaagggttttagaaaacagccgtcagccaaatgtaattgaataaagttgaagctaagatttagagatgaattaaatttaattaggggttgctaagaagcgagcactgaccagataagaatgctggttttcctaaatgcagtgaattgtgaccaagttataaatcaatgtcacttaaaggctgtggtagtactcctgcaaaattttatagctcagtttatccaaggtgtaactctaattcccattttgcaaaatttccagtacctttgtcacaatcctaacacattatcgggagcagtatcttccataatgtataaagaacaaggtagtttttacctaccacagtgtctgtatcggagacagtgatctccatatgttacactaagggtgtaagtaattatcgggaacagtgtttcccataattttcttcatgcaatgacatcttcaaagcttgaagatcgttagtatctaacatgtatcccaactcctataattccctatcttttagttttagttgcagaaacattttgtggtcattaagcattgggtgggtaaattcaaccactgtaaaatgaaattactacaaaatttgaaatttagcttgggtttttgttacctttatggtttctccaggtcctctacttaatgagatagtagcatacatttataatgtttgctattgacaagtcattttaactttatcacattatttgcatgttacctcctataaacttagtgcggacaagttttaatccagaattgaccttttgacttaaagcagagggactttgtatagaaggtttgggggctgtggggaaggagagtcccctgaaggtctgacacgtctgcctacccattcgtggtgatcaattaaatgtaggtatgaataagttcgaagctccgtgagtgaaccatcattataaacgtgatgatcagctgtttgtcatagggcagttggaaacggcctcctagggaaaagttcatagggtctcttcaggttcttagtgtcacttacctagatttacagcctcacttgaatgtgtcactactcacagtctctttaatcttcagttttatctttaatctcctcttttatcttggactgacatttagcgtagctaagtgaaaaggtcatagctgagattcctggttcgggtgttacgcacacgtacttaaatgaaagcatgtggcatgttcatcgtataacacaatatgaatacagggcatgcattttgcagcagtgagtctcttcagaaaacccttttctacagttagggttgagttacttcctatcaagccagtacgtgctaacaggctcaatattcctgaatgaaatatcagactagtgacaagctcctggtcttgagatgtcttctcgttaaggagatgggccttttggaggtaaaggataaaatgaatgagttctgtcatgattcactattctagaacttgcatgacctttactgtgttagctctttgaatgttcttgaaattttagactttctttgtaaacaaatgatatgtccttatcattgtataaaagctgttatgtgcaacagtgtggagattccttgtctgatttaataaaatacttaaacactgaaaaaaaaaaaaaaaaaaaaaaaaaaaaaaaaaaaaaaaaaaaaaaaaaaaaaaaaaaaaaaaaaaaaaaaaaaaaaaaaagtaccttctgaggcggaaagaaccagccggatctcgacttcgagcttatttatattccaaaaaaaaaaaataaaatttcaatttttaagctttcactaattccaaacccacccgctttttatagtaagtttttcacccataaataataaatacaataattaatttctcgtaaaagtagaaaatatattctaatttattgcacggtaaggaagtagatcataactcgagcatgggagatcccgtcgttttacaacgtcgtgactgggaaaaccctggcgttacccaacttaatcgccttgcagcacatccccctttcgccagctggcgtaatagcgaagaggcccgcaccgatcgcccttcccaacagttgcgcagcctgaatggcgaatggcgctttgcctggtttccggcaccagaagcggtgccggaaagctggctggagtgcgatcttcctgaggccgatactgtcgtcgtcccctcaaactggcagatgcacggttacgatgcgcccatctacaccaacgtgacctatcccattacggtcaatccgccgtttgttcccacggagaatccgacgggttgttactcgctcacatttaatgttgatgaaagctggctacaggaaggccagacgcgaattatttttgatggcgttaactcggcgtttcatctgtggtgcaacgggcgctgggtcggttacggccaggacagtcgtttgccgtctgaatttgacctgagcgcatttttacgcgccggagaaaaccgcctcgcggtgatggtgctgcgctggagtgacggcagttatctggaagatcaggatatgtggcggatgagcggcattttccgtgacgtctcgttgctgcataaaccgactacacaaatcagcgatttccatgttgccactcgctttaatgatgatttcagccgcgctgtactggaggctgaagttcagatgtgcggcgagttgcgtgactacctacgggtaacagtttctttatggcagggtgaaacgcaggtcgccagcggcaccgcgcctttcggcggtgaaattatcgatgagcgtggtggttatgccgatcgcgtcacactacgtctgaacgtcgaaaacccgaaactgtggagcgccgaaatcccgaatctctatcgtgcggtggttgaactgcacaccgccgacggcacgctgattgaagcagaagcctgcgatgtcggtttccgcgaggtgcggattgaaaatggtctgctgctgctgaacggcaagccgttgctgattcgaggcgttaaccgtcacgagcatcatcctctgcatggtcaggtcatggatgagcagacgatggtgcaggatatcctgctgatgaagcagaacaactttaacgccgtgcgctgttcgcattatccgaaccatccgctgtggtacacgctgtgcgaccgctacggcctgtatgtggtggatgaagccaatattgaaacccacggcatggtgccaatgaatcgtctgaccgatgatccgcgctggctaccggcgatgagcgaacgcgtaacgcgaatggtgcagcgcgatcgtaatcacccgagtgtgatcatctggtcgctggggaatgaatcaggccacggcgctaatcacgacgcgctgtatcgctggatcaaatctgtcgatccttcccgcccggtgcagtatgaaggcggcggagccgacaccacggccaccgatattatttgcccgatgtacgcgcgcgtggatgaagaccagcccttcccggctgtgccgaaatggtccatcaaaaaatggctttcgctacctggagagacgcgcccgctgatcctttgcgaatacgcccacgcgatgggtaacagtcttggcggtttcgctaaatactggcaggcgtttcgtcagtatccccgtttacagggcggcttcgtctgggactgggtggatcagtcgctgattaaatatgatgaaaacggcaacccgtggtcggcttacggcggtgattttggcgatacgccgaacgatcgccagttctgtatgaacggtctggtctttgccgaccgcacgccgcatccagcgctgacggaagcaaaacaccagcagcagtttttccagttccgtttatccgggcaaaccatcgaagtgaccagcgaatacctgttccgtcatagcgataacgagctcctgcactggatggtggcgctggatggtaagccgctggcaagcggtgaagtgcctctggatgtcgctccacaaggtaaacagttgattgaactgcctgaactaccgcagccggagagcgccgggcaactctggctcacagtacgcgtagtgcaaccgaacgcgaccgcatggtcagaagccgggcacatcagcgcctggcagcagtggcgtctggcggaaaacctcagtgtgacgctccccgccgcgtcccacgccatcccgcatctgaccaccagcgaaatggatttttgcatcgagctgggtaataagcgttggcaatttaaccgccagtcaggctttctttcacagatgtggattggcgataaaaaacaactgctgacgccgctgcgcgatcagttcacccgtgcaccgctggataacgacattggcgtaagtgaagcgacccgcattgaccctaacgcctgggtcgaacgctggaaggcggcgggccattaccaggccgaagcagcgttgttgcagtgcacggcagatacacttgctgatgcggtgctgattacgaccgctcacgcgtggcagcatcaggggaaaaccttatttatcagccggaaaacctaccggattgatggtagtggtcaaatggcgattaccgttgatgttgaagtggcgagcgatacaccgcatccggcgcggattggcctgaactgccagctggcgcaggtagcagagcgggtaaactggctcggattagggccgcaagaaaactatcccgaccgccttactgccgcctgttttgaccgctgggatctgccattgtcagacatgtataccccgtacgtcttcccgagcgaaaacggtctgcgctgcgggacgcgcgaattgaattatggcccacaccagtggcgcggcgacttccagttcaacatcagccgctacagtcaacagcaactgatggaaaccagccatcgccatctgctgcacgcggaagaaggcacatggctgaatatcgacggtttccatatggggattggtggcgacgactcctggagcccgtcagtatcggcggaattccagctgagcgccggtcgctaccattaccagttggtctggtgtcaaaaataataataaccgggcaggggggatccaattctgtgagcgtatggcaaacgaaggaaaaatagttatagtagccgcactcgatgggacatttcaacgtaaaccgtttaataatattttgaatcttattccattatctgaaatggtggtaaaactaactgctgtgtgtatgaaatgctttaaggaggcttccttttctaaacgattgggtgaggaaaccgagatagaaataataggaggtaatgatatgtatcaatcggtgtgtagaaagtgttacatcgactcataatattatattttttatctaaaaaactaaaaataaacattgattaaattttaatataatacttaaaaatggatgttgtgtcgttagataaaccgtttatgtattttgaggaaattgataatgagttagattacgaaccagaaagtgcaaatgaggtcgcaaaaaaactgccgtatcaaggacagttaaaactattactaggagaattattttttcttagtaagttacagcgacacggtatattagatggtgccaccgtagtgtatataggatctgctcccggtacacatatacgttatttgagagatcatttctataatttaggagtgatcatcaaatggatgctaattgacggccgccatcatgatcctattttaaatggattgcgtgatgtgactctagtgactcggttcgttgatgaggaatatctacgatccatcaaaaaacaactgcatccttctaagattattttaatttctgatgtgagatccaaacgaggaggaaatgaacctagtacggcggatttactaagtaattacgctctacaaaatgtcatgattagtattttaaaccccgtggcgtctagtcttaaatggagatgcccgtttccagatcaatggatcaaggacttttatatcccacacggtaataaaatgttacaaccttttgctccttcatattcagctgaaatgagattattaagtatttataccggtgagaacatgagactgactcgagttaccaaattagacgctgtaaattatgaaaaaaagatgtactaccttaataagatcgtccgtaacaaagtagttgttaactttgattatcctaatcaggaatatgactattttcacatgtactttatgctgaggaccgtgtactgcaataaaacatttcctactactaaagcaaaggtactatttctacaacaatctatatttcgtttcttaaatattccaacaacatcaactgaaaaagttagtcatgaaccaatacaacgtaaaatatctagcaaaaattctatgtctaaaaacagaaatagcaagagatccgtacgcggtaataaatagaaacgtactactgagatatactaccgatatagagtataatgatttagttactttaataaccgttagacataaaattgattctatgaaaactgtgtttcaggtatttaacgaatcatccataaattatactccggttgatgatgattatggagaaccaatcattataacatcgtatcttcaaaaaggtcataacaagtttcctgtaaattttctatacatagatgtggtaatatctgacttatttcctagctttgttagactagatactacagaaactaatatagttaatagtgtactacaaacaggcgatggtaaaaagactcttcgtcttcccaaaatgttagagacggaaatagttgtcaagattctctatcgccctaatataccattaaaaattgttagatttttccgcaataacatggtaactggagtagagatagccgatagatctgttatttcagtcgctgattaatcaattagtagagatgagataagaacattataataatcaataatatatcttatatcttatatcttatatcttatatcttgtttagaaaaatgctaatattaaaatagctaacgctagtaatccaatcggaagccatttgatatctataatagggtatctaatttcctgatttaaatagcggacagctatattctcggtagctactcgtttggaatcacaaacattatttacatctaatttactatctgtaatggaaacgtttcccaatgaaatggtacaatccgatacattgcattttgttatatttttttttaaagaggctggtaacaacgcatcgcttcgtttacatggctcgtaccaacaataatagggtaatcttgtatctattcctatccgtactatgcttttatcaggataaatacatttacatcgtatatcgtctttgttagcatcacagaatgcataaatttgttcgtccgtcatgataaaaatttaaagtgtaaatataactattatttttatagttgtaataaaaagggaaatttgattgtatactttcggttctttaaaagaaactgacttgataaaaatggctgtaatctctaaggttacgtatagtctatatgatcaaaaagagattaatgctacagatattatcattagtcatgttaaaaatgacgacgatatcggtaccgttaaagatggtagactaggtgctatggatggggcattatgtaagacttgtgggaaaacggaattggaatgtttcggtcactggggtaaagtaagtatttataaaactcatatagttaagcctgaatttatttcagaaattattcgtttactgaatcatatatgtattcactgcggattattgcgttcacgagaaccgtattccgacgatattaacctaaaagagttatcgggacacgctcttaggagattaaaggataaaatattatccaagaaaaagtcatgttggaacagtgaatgtatgcaaccgtatcaaaaaattactttttcaaagaaaaaggtttgtttcgtcaacaagttggatgatattaacgttcctaattctctcatctatcaaaagttaatttctattcatgaaaagttttggccattattagaaattcatcaatatccagctaacttattttatacagactactttcccatccctccgttgattattagaccggctattagtttttggatagatagtatacccaaagagaccaatgaattaacttacttattaggtatgatcgttaagaattgtaacttgaatgctgatgaacaggttatccagaaggcggtaatagaatacgatgatattaaaattatttctaataacactaccagtatcaatttatcatatattacatccggcaaaaataatatgattagaagttatatcgtcgcccgacgaaaagatcagaccgctagatctgtaattggtcccagtacatctatcaccgttaatgaggtaggaatgcccgcatatattagaaatacacttacagaaaagatatttgttaatgcctttacagtggataaagttaaacaactattagcgtcaaaccaagttaaattttactttaataaacgattaaaccaattaacaagaatacgccaaggaaagtttattaaaaataaaatacatttattgcctggtgattgggtagaagtagctgttcaagaatatacaagtattatttttggaagacagccgtctctacatagatacaacgtcatcgcttcatctatcagagctaccgaaggagatactatcaaaatatctcccggaattgccaactctcaaaatgctgatttcgacggggatgaggaatggatgatattagaacaaaatcctaaagctgtaattgaacaaagtattcttatgtatccgacgacgttactcaaacacgatattcatggagcccccgtttatggatctattcaagatgaaatcgtagcagcgtattcattgtttaggatacaagatctttgtttagatgaagtattgaacatcttggggaaatatggaagagagttcgatcctaaaggtaaatgtaaattcagcggtaaagatatctatacttacttgataggtgaaaagattaattatccgggtctcttaaaggatggtgaaattattgcaaacgacgtagatagtaattttgttgtggctatgaggcatctgtcattggctggactcttatccgatcataagtcgaacgtggaaggtatcaactttattatcaagtcatcttatgtttttaagagatatctatctatttacggttttggggtgacattcaaagatctgagaccaaattcgacgttcactaataaattggaggccatcaacgtagaaaaaatagaacttatcaaagaagcatacgccaaatatctcaacgatgtaagagacgggaaaatagttccattatctaaagctttagaggcggactatgtggaatccatgttatccaacttgacaaatcttaatatccgagagatagaagaacatatgagacaaacgctgatagatgatccagataataacctcctgaaaatggccaaagcgggttataaagtaaatcccacagaactaatgtatattctaggtacgtatggacaacaaaggattgatggtgaaccagcagagactcgagtattgggtagagttttaccttactatcttccagactctaaggatccagaaggaagaggttacattcttaattctttaacaaaaggattaacgggttctcaatattacttttcgatgctggttgccagatctcaatctactgatatcgtctgtgaaacatcacgtaccggaacactggctagaaaaatcattaaaaagatggaggatatggtggtcgacggatacggacaagtagttataggtaatacgctcatcaagtacgccgccaattataccaaaattctaggctcagtatgtaaacctgtagatcttatctatccagatgagtccatgacttggtatttggaaattagtgctctgtggaataaaataaaacagggattcgtttactctcagaaacagaaacttgcaaagaagacattggcgccgtttaatttcctagtattcgtcaaacccaccactgaggataatgctattaaggttaaggatctgtacgatatgattcataacgtcattgatgatgtgagagagaaatacttctttacggtatctaatatagattttatggagtatatattcttgacgcatcttaatccttctagaattagaattacaaaagaaacggctatcactatctttgaaaagttctatgaaaaactcaattatactctaggtggtggaactcctattggaattatttctgcacaggtattgtctgagaagtttacacaacaagccctgtccagttttcacactactgaaaaaagtggtgccgtcaaacaaaaacttggtttcaacgagtttaataacttgactaatttgagtaagaataagaccgaaattatcactctggtatccgatgatatctctaaacttcaatctgttaagattaatttcgaatttgtatgtttgggagaattaaatccaaacatcactcttcgaaaagaaacagataaatatgtagtagatataatagtcaatagattatacatcaagagagcagaaataaccgaattagtcgtcgaatatatgattgaacgatttatctcctttagcgtcattgtaaaggaatggggtatggagacattcattgaggacgaggataatattagatttactgtctacctaaatttcgttgaaccggaagaattgaatcttagtaagtttatgatggttcttccgggggcagccaacaagggaaagattagtaaattcaagattcctatctctgattatacgggatatgacgacttcaatcaaacaaaaaagctcaataagatgactgtagaactcatgaatctaaaagaattgggttctttcgatttggaaaacgtcaacgtgtatcctggagtatggaatacatacgatatcttcggtatcgaggccgctcgtgaatacttgtgcgaagccatgttaaacacctatggagaagggttcgattatctgtatcagccttgtgatcttctcgctagtttactatgtgctagttacgaaccagaatcagtgaataaattcaagttcggcgcagctagtactcttaagagagctacgttcggagacaataaagcattgttaaacgcggctcttcataaaaagtcagaacctattaacgataatagtagctgccacttttttagcaaggtccctaatataggaactggatattacaaatactttatcgacttgggtcttctcatgagaatggaaaggaaactatctgataagatatcttctcaaaagatcaaggaaatggaagaaacagaagacttttaattcttatcaataacatatttttctatgatctgtcttttaaacgatggattttccacaaatgcgcctctcaagtccctcatagaatgatacacgtataaaaaatatagcataggcaatgactccttatttttagacattagatatgccaaaatcatagccccgcttctatttactcccgcagcacaatgaaccaacacgggctcgtttcgttgatcacatttagataaaaaggcggttacgtcgtcaaaatatttactaatatcggtagttgtatcatctaccaacggtatatgaataatattaatattagagttaggtaatgtatatttatccatcgtcaaatttaaaacatatttgaacttaacttcagatgatggtgcatccatagcatttttataatttcccaaatacacattattggttacccttgtcattatagtgggagatttggctttgtgcatatctccagttgaacgtagtagtaagtatttatacaaacttttcttatccatttataacgtacaaatggataaaactactttatcggtaaacgcgtgtaatttagaatacgttagagaaaaggctatagtaggcgtacaagcagccaaaacatcaacacttatattctttgttattatattggcaattagtgcgctattactctggtttcagacgtctgataatccagtctttaatgaattaacgagatatatgcgaattaaaaatacggttaacgattggaaatcattaacggatagcaaaacaaaattagaaagtgatagaggtagacttctagccgctggtaaggatgatatatttgaattcaaatgtgtggatttcggcgcctattttatagctatgcgattggataagaaaacatatctgccgcaagctattaggcgaggtactggagacgcgtggatggttaaaaaggcggcaaaggtcgatccatctgctcaacaattttgtcagtatttgataaaacacaagtctaataatgttattacttgtggtaatgagatgttaaatgaattaggttatagcggttattttatgtcaccgcattggtgttccgattttagtaatatggaatagtgttagataaatgcggtaacgaatgttcctgtaaggaaccataacagcttagatttaacgttaaagatgagcataaacataataaacaaaattacaatcaaacttataacattaatatcaaacaatccaaaaaatgaaatcagtggagtagtaaacgcgtacataactcctggataacgtttagcagctgccgttcctattctagaccaaaaattcggtttcatgttttcgaaacggtattctgcaacaagtcgaggatcgtgttctacatatttggcggcattatccagtatctgcctattgatcttcatttcgttttcgattctggctatttcaaaataaaatcccgatgatagacctccagactttataatttcatctacgatgttcagcgccgtagtaactctaataatataggctgataagctaacatcataccctcctgtatatgtgaatatggcatgatttttgtccattacaagctcggttttaactttattgcctgtaataatttctctcatctgtaggatatctatttttttgtcatgcattgccttcaagacgggacgaagaaacgtaatatcctcaataacgttatcgttttctacaataactacatattctacctttttattttctaactcggtaaaaaaattagaatcccatagggctaaatgtctagcgatatttcttttcgtttcctctgtacacatagtgttacaaaaccctgaaaagaagtgagtatacttgtcatcatttctaatgtttcctccagtccactgtataaacgcataatccttgtaatgatctggatcatccttgactaccacaacatttcttttttctggcataacttcgttgtcctttacatcatcgaacttctgatcattaatatgctcatgaacattaggaaatgtttctgatggaggtctatcaataactggcacaacaataacaggagttttcaccgccgccatttagttattgaaattaatcatatacaactctttaatacgagttatattttcgtctatccattgtttcacattgacatatttcgacaaaaagatataaaatgcgtattccaatgcttctctgtttaatgaattactaaaatatacaaacacgtcactgtctggcaataaatgatatcttagaatattgtaacaatttattttgtattgcacatgttcgtgatctatgagttcttcttcgaatggcataggatctccgaatctgaaaacgtataaataggagttagaataataatatttgagagtattggtaatatataaactctttagcggtataattagtttttttctctcaatttctatttttagatgtgatggaaaaatgactaattttgtagcattagtatcatgaactctaatcaaaatcttaatatcttcgtcacacgttagctctttgaagtttttaagagatgcatcagttggttctacagatggagtaggtgcaacaattttttgttctacacatgtatgtactggagccattgttttaactataatggtgcttgtatcgaaaaactttaatgcagatagcggaagctcttcgccgcgactttctacgtcgtaattgggttctaacgccgatctctgaatggatactagttttctaagttctaatgtgattctctgaaaatgtaaatccaattcctccggcattatagatgtgtatacatcggtaaataaaactatagtatccaacgatcccttctcgcaaattctagtcttaaccaaaaaatcgtatataaccacggagatggcgtatttaagagtggattcttctaccgttttgttcttggatgtcatataggaaactataaagtccgcactactgttaagaatgattactaacgcaactatatagtttaaattaagcattttggaaacataaaataactctgtagacgatacttgactttcgaataagtttgcagacaaacgaagaaagaacagacctctcttaatttcagaagaaaactttttttcgtattcctgacgtctagagtttatatcaataagaaagttaagaattagtcggttaatgttgtatttcattacccaagtttgagatttcataatattatcaaaagacatgataatattaaagataaagcgctgactatgaacgaaatagctatatggttcgctcaagaatatagtcttgttaaacgtggaaacgataactgtatttttaatcacgtcagcggcatctaaattaaatataggtatatttattccacacactctacaatatgccacaccatcttcataataaataaattcgttagcaaaattattaattttagtgaaatagttagcgtcaactttcatagcttccttcaatctaatttgatgctcacacggtgcgaattccactctaacatcccttttccatgcctcaggttcatcgatctctataatatctagttttttgcgtttcacaaacacaggctcgtctctcgcgatgagatctgtatagtaactatgtaaatgataactagatagaaagatgtagctatatagatgacgatcctttaagagaggtataataactttaccccaatcagatagactgttgttatggtcttcggaaaaagaatttttataaatttttccagtattttccaaatatacgtacttaacatctaaaaaatccttaatgataataggaatggataatccgtctattttataaagaaatacatatcgcacattatacttttttttggaaatgggaataccgatgtgtctacataaatatgcaaagtctaaatattttttagagaatcttagttggtccaaattcttttccaagtacggtaatagatttttcatattgaacggtatcttcttaatctctggttctagttccgcattaaatgatgaaactaagtcactatttttataactaacgattacatcacctctaacatcatcatttaccagaatactgatcttcttttgtcgtaaatacatgtctaatgtgttaaaaaaaagatcatacaagttatacgtcatttcatctgtggtattcttgtcattgaaggataaactcgtactaatctcttctttaacagcctgttcaaatttatatcctatatacgaaaaaatagcaaccagtgtttgatcatccgcgtcaatattctgttctatcgtagtgtataacaatcgtatatcttcttctgtgatagtcgatacgttataaaggttgataacgaaaatatttttatttcgtgaaataaagtcatcgtaggattttggacttatattcgcgtctagtagatatgcttttatttttggaatgatctcaattagaatagtctctttagagtccatttaaagttacaaacaactaggaaattggtttatgatgtataatttttttagtttttatagattctttattctatacttaaaaaatgaaaataaatacaaaggttcttgagggttgtgttaaattgaaagcgagaaataatcataaattatttcattatcgcgatatccgttaagtttgtatcgtaatggcgtggtcaattacgaataaagcggatactagtagcttcacaaagatggctgaaatcagagctcatctaaaaaatagcgctgaaaataaagataaaaacgaggatattttcccggaagatgtaataattccatctactaagcccaaaaccaaacgagccactactcctcgtaaaccagcggctactaaaagatcaaccaaaaaggaggaagtggaagaagaagtagttatagaggaatatcatcaaacaactgaaaaaaattctccatctcctggagtcagcgacattgtagaaagcgtggccgctgtagagctcgatgatagcgacggggatgatgaacctatggtacaagttgaagctggtaaagtaaatcatagtgctagaagcgatctctctgacctaaaggtggctaccgacaatatcgttaaagatcttaagaaaattattactagaatctctgcagtatcgacggttctagaggatgttcaagcagctggtatctctagacaatttacttctatgactaaagctattacaacactatctgatctagtcaccgagggaaaatctaaagttgttcgtaaaaaagttaaaacttgtaagaagtaaatgcgtgcacttttttataaagatggtaaactctttaccgataataattttttaaatcctgtatcagacgataatccagcgtatgaggttttgcaacatgttaaaattcctactcatttaacagatgtagtagtatatgaacaaacgtgggaggaggcgttaactagattaatttttgtgggaagtgattcaaaaggacgtagacaatacttttacggaaaaatgcatgtacagaatcgcaacgctaaaagagatcgtatttttgttagagtatataacgttatgaaacgaattaattgttttataaacaaaaatataaagaaatcgtccacagattccaattatcagttggcggtttttatgttaatggaaactatgttttttattagatttggtaaaatgaaatatcttaaggagaatgaaacagtagggttattaacactaaaaaataaacacatagaaataagtcccgatgaaatagttatcaagtttgtaggaaaggacaaagtttcacatgaatttgttgttcataagtctaatagactatataaaccgctattgaaactgacggatgattctagtcccgaagaatttctgttcaacaaactaagtgaacgaaaggtatacgaatgtatcaaacagtttggtattagaatcaaggatctccgaacgtatggagtcaattatacgtttttatataatttttggacaaatgtaaagtccatatctcctcttccgtcaccaaaaaagttaatagcattaactatcaaacaaactgctgaagtggtaggtcatactccatcaatttcaaaaagagcttatatggcaacgactattttagaaatggtaaaggataaaaattttttagatgtagtatctaaaactacgttcgatgaattcctatctatagtcgtagatcacgttaaatcatctacggatggatgatatagatctttacacaaataattacaagaccgataaatggaaatggataagcgtatgaaatctctcgcaatgacagctttcttcggagagctaagcacattagatattatggcattgataatgtctatatttaaacgccatccaaacaataccattttttcagtggataaggatggtcagtttatgattgatttcgaatacgataattataaggcttctcaatatttggatctgaccctcactccgatatctggagatgaatgcaagactcacgcatcgagtatagccgaacaattggcgtgtgcggatattattaaagaggatattagcgaatatatcaaaactactccccgtcttaaacgatttataaaaaaataccgcaatagatcagatactcgtatcagtcgagatacagaaaagcttaaaatagctctagctaaaggcatagattacgaatatataaaagacgcttgttaataagtaaatgaaaaaaaactagtcgtttataataaaacacgatatggatgccaacgtagtatcattttctactattgcgacgtatatagacgctttagcgaagaatgcttcggaattagaacagaggtctaccgcatacgaaataaataatgaattggaactagtatttattaagccgccattgattactttgacaaatgtagtgaatatctctacgattcaggaatcgtttattcgatttaccgttactaataaggaaggtgttaaaattagaactaagattccattatctaaggtacatggtctagatgtaaaaaatgtacagttagtagatgctatagataacatagtttgggaaaagaaatcattagtgacggaaaatcgtcttcacaaagaatgcttgttgagactatcgacagaggaacgtcatatatttttggattacaagaaatatggatcctctatccgactagaattagtcaatcttattcaagcaaaaacaaaaaactttacgatagactttaagctaaaatattttctaggatccggtgcccagtctaaaagttctttgttgcacgctattaatcatccaaagtcaaggcctaatacatctctggaaatagaattcacacctagagacaatgaaacagttccatatgatgaactaataaaggaattgacgactctctcgcgtcatatatttatggcttctccagagaatgtaattctttctccgcctattaacgcgcctataaaaacctttatgttgcctaaacaagatatagtaggtttggatctggaaaatctatatgccgtaactaagactgacggcattcctataactatcagagttacatcaaacgggttgtattgttattttacacatcttggttatattattagatatcctgttaagagaataatagattccgaagtagtagtctttggtgaggcagttaaggataagaactggaccgtatatctcattaagctaatagagcctgtgaatgcaatcaatgatagactagaagaaagtaagtatgttgaatctaaactagtggatatttgtgatcggatagtattcaagtcaaagaaatacgaaggtccgtttactacaactagtgaagtcgtcgatatgttatctacatatttaccaaagcaaccagaaggtgttattctgttctattcaaagggacctaaatctaacattgattttaaaattaaaaaggaaaatactatagaccaaactgcaaatgtagtatttaggtacatgtccagtgaaccaattatctttggagaatcgtctatctttgtagagtataagaaatttagcaacgataaaggctttcctaaagaatatggttctggtaagattgtgttatataacggcgttaattatctaaataatatctattgtttggaatatattaatacacataatgaagtgggtattaagtccgtggttgtacctattaagtttatagcagaattcttagttaatggagaaatacttaaacctagaattgataaaaccatgaaatatattaactcagaagattattatggaaatcaacataatatcatagtcgaacatttaagagatcaaagcatcaaaataggagatatctttaacgaggataaactatcggatgtgggacatcaatacgccaataatgataaatttagattaaatccagaagttagttattttacgaataaacgaactagaggaccgttgggaattttatcaaactacgtcaagactcttcttatttctatgtattgttccaaaacatttttagacgattccaacaaacgaaaggtattggcgattgattttggaaacggtgctgacctggaaaaatacttttatggagagattgcgttattggtagcgacggatccggatgctgatgctatagctagaggaaatgaaagatacaacaaattaaactctggaattaaaaccaagtactacaaatttgactacattcaggaaactattcgatccgatacatttgtctctagtgtcagagaagtattctattttggaaagtttaatatcatcgactggcagtttgctatccattattcttttcatccgagacattatgctaccgtcatgaataacttatccgaactaactgcttctggaggcaaggtattaatcactaccatggacggagacaaattatcaaaattaacagataaaaagacttttataattcataagaatttacctagtagcgaaaactatatgtctgtagaaaaaatagctgatgatagaatagtggtatataatccatcaacaatgtctactccaatgactgaatacattatcaaaaagaacgatatagtcagagtgtttaacgaatacggatttgttcttgtagataacgttgatttcgctacaattatagaacgaagtaaaaagtttattaatggcgcatctacaatggaagatagaccgtctacaaaaaactttttcgaactaaatagaggagccattaaatgtgaaggtttagatgtcgaagacttacttagttactatgttgtttatgtcttttctaagcggtaaataataatatggtatgggttctgatctcccagttctaaatgcattaaataattccaatagagcgatttttgttcctataggaccttccaactgtggatactctgtattgttaatagatatattaatacttttgtcgggtaacagaggttctacgtcttctaaaaataaaagttttataacatctggcctgttcataaataaaaacttggcgattctatatatactcttattatcaaatctagccattgtcttatagatgtgagctactgtaggtgtaccatttgattttctttctaatactatatatttctctcgaagaagttcttgcacatcatctgggaataaaatactactgttgagtaaatcagttattttttttatatcgatattgatggacatttttatagttaaggataataagtatcccaaagtcgataacgacgataacgaagtatttatacttttaggaaatcacaatgactttatcagattaaaattaacaaaattaaaggagcatgtatttttttctgaatatattgtgactccagatacatatggatctttatgcgtcgaattaaatgggtctagttttcagcacggcggtagatatatagaggtggaggaatttatagatgctggaagacaagttagatggtgttctacatccaatcatatatctaaagatatacccgaagatatgcacactgataaatttgtcatttatgatatttatacgtttgattcgttcaagaataaacgattggtattcgtacaggtacctccgtcgttaggagatgatagtcatttgactaatccgttattgtcaccgtattatcgtaattcagtagccagacaaatggtcaatgatatgatttttaatcaagattcatttttaaaatatttattagaacatctgattagaagccactatagagtttctaaacatataacaatagttagatacaaggataccgaagaattaaatctaacgagaatatgttataatagagataagtttaaggcgtttgtattcgcttggtttaacggcgtttcggaaaatgaaaaggtactagatacgtataaaaaggtatctaatttgatataatgaattcagtgactgtatcacacgcgccatatactattacttatcacgatgattgggaaccagtaatgagtcaattggtagagttttataacgaagtagccagttggctgctacgagacgagacgtcgcctattcctgataagttctttatacagttgaaacaaccgcttagaaataaacgagtatgtgtgtgtggtatagatccgtatccgaaagatggaactggtgtaccgttcgaatcaccaaattttacaaaaaaatcaattaaggagatagcttcatctatatctagattaaccggagtaattgattataaaggttataaccttaatataatagacggggttataccctggaattattacttaagttgtaaattaggagaaacaaaaagtcacgcgatttactgggataagatttccaagttactgctgcagcatataactaaacacgttagtgttctttattgtttgggtaaaacagatttctcgaatatacgggccaagttagaatccccggtaactaccatagtcggatatcatccagcggctagagaccgccaattcgagaaagatagatcatttgaaattatcaacgttttactggaattagacaacaaggcacctataaattgggctcaagggtttatttattaatgctttagtgaaattttaacttgtgttctaaatggatgcggctattagaggtaatgatgttatctttgttcttaagactataggtgtcccgtcagcgtgcagacaaaatgaagatccaagatttgtagaagcatttaaatgcgacgagttagaaagatatattgagaataatccagaatgtacactattcgaaagtcttagggatgaggaagcatactctatagtcagaattttcatggatgtagatttagacgcgtgtctagacgaaatagattatttaacggccattcaagattttattatcgaggtgtcaaactgtgtagctagattcgcgtttacagaatgcggcgccattcatgaaaatgtaataaaatccatgagatctaatttttcattgactaagtctacaaatagagataaaacaagttttcatattatctttttagatacgtataccactatggatacattgatagctatgaaacgaacactattagaattaagtagatcatctgaaaatccactaaccagatcgatagacactgccgtatataggagaaaaacaactcttcgggttgtaggtactaggaaaaatccaaattgcgacactattcatgtaatgcaaccaccgcatgataatatagaagattacctattcacttacgtggatatgaacaacaatagttattacttttctctacaacaacgattggaggatttagttcctgataagttatgggaaccagggtttatttcattcgaagacgctataaaaagagtttcaaaaatattcattaattctataataaactttaatgatctcgatgaaaataattttacaacggtaccactggtcatagattacgtaacaccttgtgcattatgtaaaaaacgatcgcataaacatccgcatcaactatcgttggaaaatggtgctattagaatttacaaaactggtaatccacatagttgtaaagttaaaattgttccgttggatggtaataaactgtttaatattgcacaaagaattttagacactaactctgttttattaaccgaacgaggagaccatatagtttggattaataattcatggaaatttaacagcgaagaacccttgataacaaaactaattttgtcaataagacatcaactacctaaggaatattcaagcgaattactctgtccaagaaaacgaaagactgtagaagctaacatacgagacatgttagtagattcagtggagaccgatacctatccggataaacttccgtttaaaaatggtgtattggacctggtagacggaatgttttactctggagatgatgctaaaaaatatacgtgtactgtatcaaccggatttaaatttgacgatacaaagttcgtcgaagacagtccagaaatggaagagttaatgaatatcattaacgatatccaaccattaacggatgaaaataagaaaaatagagagctatatgaaaaaacattatctagttgtttatgcggtgctaccaaaggatgtttaacattcttttttggagaaactgcaactggaaagtcgacaaccaaacgtttgttaaagtctgctatcggtgacctgtttgttgagacgggtcaaacaattttaacagatgtattggataaaggacctaatccatttatcgctaacatgcatttgaaaagatctgtattctgtagcgaactacctgattttgcctgtagtggatcaaagaaaattagatctgacaatattaaaaagttgacagaaccttgtgtcattggaagaccgtgtttctccaataaaattaataatagaaaccatgcgacaatcattatcgatactaattacaaacctgtttttgataggatagataacgcattaatgagaagaattgccgtcgtgcgattcagaacacacttttctcaaccttctggtagagaggctgctgaaaataatgacgcgtacgataaagtcaaactattagacgaggggttagatggtaaaatacaaaataatatatatagatttgcatttctatacttgttggtgaaatggtacaaaaaatatcatgttcctattatgaaactatatcctacacccgaagagattcctgactttgcattctatctcaaaataggtactctgttggtatctagctctgtaaagcatattccattaatgacggacctctccaaaaagggatatatattgtacgataatgtggtcactcttccgttgactactttccaacagaaaatatccaagtattttaattctagactatttggacacgatatagagagcttcatcaatagacataagaaatttgccaatgttagtgatgaatatctgcaatatatattcatagaggatatttcatctccgtaaatatatgctcatatatttatagaagatatcacatatctaaatgaataccggaatcatagatttatttgataatcatgttgatagtataccaactatattacctcatcagttagctactctagattatctagttagaactatcatagatgagaacagaagcgtgttattgttccatattatgggatcaggtaaaacaataatcgctttgttgttcgccttggtagcttccagatttaaaaaggtttacattctagtgccgaacatcaacatcttaaaaattttcaattataatatgggtgtagctatgaacttgtttaatgacgaattcatagctgagaatatctttattcattccacaacaagtttttattctcttaattataacgataacgtcattaattataacggattatctcgctacaataactctatttttatcgttgatgaggcacataatatctttgggaataatactggagaacttatgaccgtgataaaaaataaaaacaagattccttttttactattgtctggatctcccattactaacacacctaatactctgggtcatattatagatttaatgtccgaagagacgatagattttggtgaaattattagtcgtggtaagaaagtaattcagacacttcttaacgaacgcggtgtgaatgtacttaaggatttgcttaaaggaagaatatcatattacgaaatgcctgataaagatctaccaacgataagatatcacggacgtaagtttctagatactagagtagtatattgtcacatgtctaaacttcaagagagagattatatgattactagacgacagctatgttatcatgaaatgtttgataaaaatatgtataacgtgtcaatggcagtattgggacaacttaatctgatgaataatttagatactttatttcaggaacaggataaggaattgtacccaaatctgaaaataaataatggcgtgttatacggagaagaattggtaacgttaaacattagttccaaatttaaatactttattaatcggatacagacactcaacggaaaacattttatatacttttctaattctacatatggcggattggtaattaaatatatcatgctcagtaatggatattctgaatataatggttctcagggaactaatccacatatgataaacggcaaaccaaaaacatttgctatcgttactagtaaaatgaaatcgtctttagaggatctattagatgtgtataattctcctgaaaacgatgatggtagtcaattgatgtttttgttttcatcaaacattatgtccgaatcctatactctaaaagaggtaaggcatatttggtttatgactatcccagatactttttctcaatacaaccaaattcttggacgatctattagaaaattctcttacgccgatatttctgaaccagttaatgtatatcttttagccgccgtatattccgatttcaatgacgaagtgacgtcattaaacgattacacacaggatgaattaattaatgttttaccatttgacatcaaaaagctgttgtatctaaaatttaagacgaaagaaacgaatagaatatactctattcttcaagagatgtctgaaacgtattctcttccaccacatccatcaattgtaaaagttttattgggagaattggtcagacaatttttttataataattctcgtattaagtataacgataccaagttacttaaaatggttacatcagttataaaaaataaagaagacgctaggaattacatagatgatattgtaaacggtcacttctttgtatcgaataaagtatttgataaatctcttttatacaaatacgaaaacgatattattacagtaccgtttagactttcctacgaaccatttgtttggggagttaactttcgtaaagaatataacgtggtatcttctccataaaactgatgagatatataaagaaataaatgtcgagctttgttaccaatggatacctttccgttacattggaaccacacgagctgacgttagacataaaaactaatattaggaatgccgtatataagacgtatctccatagagaaattagtggtaaaatggccaagaaaatagaaattcgtgaagacgtggaattacctctcggcgaaatagttaataattctgtagttataaacgttccgtgtgtaataacctacgcgtattatcacgttggggatatagtcagaggaacattaaacatcgaagatgaatcaaatgtaactattcaatgtggagatttaatctgtaaactaagtagagattcgggtactgtatcatttagcgattcaaagtactgcttttttcgaaatggtaatgcgtatgacaatggcagcgaagtcactgccgttctaatggaggctcaacaaggtatcgaatctagttttgtttttctcgcgaatatcgtcgactcataaaaaagagaatagcggtaagtataaacacgaatactatggcaataattgcgaatgttttattctcttcgatatatttttgataatatgaaaaacatgtctctctcaaatcggacaaccatctcataaaatagttctcgcgcgctggagaggtagttgccgctcgtataatctctccagaataatatacttgcgtgtcgtcgttcaatttatacggatttctatagttctctgttatataatgcggtttgccctcatgattagacgacgacaatagtgttctaaatttagatagttgatcagaatgaatgtttattggcgttggaaaaattatccatacagcgtctgcagagtggttgatagttgttcctagatatgtaaaataatccaacttactaggcagcaaattgtctagataaaatactgaatcaaacggtgcagacgtattggcggatctaatggaatccaattgattaactatcttttgaaaatatacatttttatgatccaatacttgtaagaatatagaaataatgataagtccatcatcgtgtttttttgcctcttcataagaactatattttttcttattccaatgaacaagattaatctctccagagtatttgtacacatctatcaagtgattggatccataatcgtcttcctttccccaatatatatgtagtgatgataacacatattcattggggagaaaccctccacttatatatcctcctttaaaattaatccttactagttttccagtgttctggatagtggttggtttcgactcattataatgtatgtctaacggcttcaatcgcgcgttagaaattgcttttttagtttctatattaataggagatagttgttgcggcatagtaaaaatgaaatgataactgtttaaaaatagctcttagtatgggaattacaatggatgaggaagtgatatttgaaactcctagagaattaatatctattaaacgaataaaagatattccaagatcaaaagacacgcatgtgtttgctgcgtgtataacaagtgacggatatccgttaataggagctagaagaacttcattcgcgttccaggcgatattatctcaacaaaattcagattctatctttagagtatccactaaactattacggtttatgtactacaatgaactaagagaaatctttagacggttgagaaaaggttctatcaacaatatcgatcctcactttgaagagttaatattattgggtggtaaactagataaaaaggaatctattaaagattgtttaagaagagaattaaaagaggaaagtgatgaacgtataacagtaaaagaatttggaaatgtaattctaaaacttacaacacgggataaattatttaataaagtatatataagttattgcatggcgtgttttattaatcaatcgttggaggatttatcgcatactagtatttacaatgtagaaattagaaagattaaatcattaaatgattgtattaacgacgataaatacgaatatctgtcttatatttataatatgctagttaatagtaaatgaacttttacagatctagtataattagtcagattattaagtataatagacgactagctaagtctattatttgcgaggatgactctcaaattattacactcacggcattcgttaaccaatgcctatggtgtcataaacgagtatccgtgtccgctattttattaactactgataacaaaatattagtatgtaacagacgagatagttttctctattctgaaataattagaactagaaacatgtttagaaagaaacgattatttctgaattattccaattatttgaacaaacaggaaagaagtatactatcgtcatttttttctctagatccagctactactgataatgatagaatagacgctatttatccgggtggcatacccaaaaggggtgagaatgttccagagtgtttatccagggaaattaaagaagaagttaatatagacaattcttttgtattcatagacactcggttttttattcatggcatcatagaagataccattattaataaattttttgaggtaatcttctttgtcggaagaatatctctaacgagtgatcaaatcattgatacatttaaaagtaatcatgaaatcaaggatctaatatttttagatccgaattcaggtaatggactccaatacgaaattgcaaaatatgctctagatactgcaaaacttaaatgttacggccatagaggatgttattatgaatcattaaaaaaattaactgaggatgattgattaaaaaatataaattaatttaccatcgtgtatttttataacgggattgtccggcatatcatgtagatagttaccgtctacatcgtatactcgaccatctacgcctttaaatcctctatttattgacattaatctattagaattggaataccaaatattagtaccctcaattagtttattggtaatattttttttagacgatagatcgatggctcttgaaaccaaggttttccaaccggactcattgtcgatcggtgagaagtctttttcattagcatgaatccattctaatgatgtatgtttaaacactctaaacaattggacaaattcttttgatttgctttgaatgatttcaaataggtcttcgtctacagtaggcataccattagataatctagccattataaagtgcacgtttacatatctacgttctggaggagtaagaacgtgactattgagacgaatggctcttcctactatctgacgaagagacgcctcgttccatgtcatatctaaaatgaagatatcattaattgagaaaaaactaataccctcgcctccactagaagagaatacgcatgttttaatgcattctccgttagtgtttgattcttggttaaactcagccaccgccttgattctagtatcttttgttctagatgagaactctatattagagataccaaagactttgaaatatagtaataagatttctattcctgactgattaacaaatggttcaaagactagacatttaccatgggatgctaatattcccaaacatacatctataaatttgacgcttttctcttttaattcagtaaatagagagatatcagccgcactagcatcccctttcaatagttctccctttttaaaggtatctaatgcggatttagaaaactctctatctcttaatgaatttttaaaatcattatatagtgttgctatctcttgcgcgtattcgcccggatcacgattttgtctttcaggaaagctatcgaacgtaaacgtagtagccatacgtctcagaattctaaatgatgatatacctgtttttatttcagcgagtttagccttttgataaatttcttcttgctttttcgacatattaacgtatcgcattaatactgttttcttagcgaatgatgcagacccttctacgtcatcaaaaatagaaaactcgttattaactatatacgaacatagtcctcctagtttggagactaattctttttcatcgactagacgtttattctcaaatagcgattggtgttgtaaggatcctggtcgtagtaagttaaccaacatggtgaattcttgcacactattgacgataggtgtagccgataaacaaatcatcttatggttttttaacgcaatggtcttagataaaaaattatatactgaacgagtaggacggatcttaccatcttctttgattaatgatttagaaatgaagttatgacattcatcaataatgacgcatattctactcttggaattaatagttttgatattagtaaaaaatttatttctaaaattttgatcatcgtaattaataaaaatacaatccttcgttatctctggagcgtatctgagtatagtgttcatccaaggatcttctatcaaagcctttttcaccaataagataatagcccaattcgtataaatatccttaagatgtttgagaatatatacagtagtcattgttttaccgacacccgtttcatggaacaataaaagagaatgcatactgtctaatcctaagaaaactcttgctacaaaatgttgataatccttgaggcgtactacgtccgaccccatcatttcaacgggcatattagtagttctgcgtaaggcataatcgatataggccgcgtgtgatttactcatttatgagtgataagtaataactatgttttaaaaatcacagcagtagtttaactagtcttctctgatgtttgttttcgatactttttgaatcagaagtcatactagaataaagcaacgagtgaacgtaatagagagcttcgtatactctattcgaaaactctaagaacttattaatgaattccgtatccactggattgtttaaaatactaaattgaacactgttcacatccttccaagaagaagacttagtgacggacttaacatgagacataaataaatccaaattttttttacaaacatcactagccaccataatggcgctatctttcaaccagctatcgcttacgcattttagcagtctaacatttttaaagagactacaatatattctcatagtatcgattacacctctaccgaataaagttggaagtttaataatacaatatttttcgtttacaaaatcaaataatggtcgaaacacgtcgaaggttaacatcttataatcgctaatgtatagattgttttcagtgagatgattattagatttaatagcatctcgttcacgtttgaacagtttattgcgtgcgctgaggtcggcaactacggcgtccgctttagtactcctcccataatactttacgctattaatctttaaaatttcatagactttatctagatcgctttctggtaacatgatatcatgtgtaaaaagttttaacatgtcggtcggcattctatttagatcattaactctagaaatctgaagaaagtaattagctccgtattccagactaggtaatgggcttttacctagagacagattaagttctggcaatgtttcataaaatggaagaaggacatgcgttccctcccggatattttttacaatttcatccatttacaactctatagtttgttttcattattattagttattatctcccataatcttggtaatacttaccccttgatcgtaagataccttatacaggtcattacatacaactaccaattgtttttgtacataatagattggatggttgacatccatggtggaataaactactcgaacagatagtttatctttccccctagatacattagccgtaatagttgtcggcctaaagaatatctttggtgtaaagttaaaagttagggttcttgttccattattgctttttgtcagtagttcattataaattctcgagatgggtccgttctctgaatatagaacatcatttccaaatctaacttctagtctagaaataatatcggtcttattcttaaaatctattcccttgatgaagggatcgttaatgaacaaatccttggcctttgattcggctgatctattatctccgttatagacgttacgttgactagtccaaagacttacaggaatagatgtatcgatgatgttgatactatgtgatatgtgagcaaagattgttctcttagtggcatcactatatgttccagtaatggcggaaaactttttagaaatgttatatataaaagaattttttcgtgttccaaacattagcagattagtatgaagataaacactcatattatcaggaacattatcaatttttacatacacatcagcatcttgaatagaaacgataccatcttctggaacctctacgatctcggcagactccggataaccagtcggtgggccatcgctaacaataactagatcatccaacaatctactcacatatgcatctatataatctttttcatcttgtgagtaccctggatacgaaataaatttattatccgtatttccataataaggtttagtataaacagagagagatgttgccgcatgaacttcagttacagtcgccgttggttggtttatttgacctattactctcctaggtttctctataaacgatggtttaatttgtacattcttaaccatatatccaataaagctcaattcaggaacataaacaaattctttgttgaacgtttcaaagtcgaacgaagagtcacgaataacgatatcggatactggattgaaggttaccgttacggtaatttttgaatcggatagtttaagactgctgaatgtatcttccacatcaaacggagttttaatataaacgtatactgtagatggttctttaatagtgtcattaggagttaggccaatagaaatatcattaagttcactagaatatccagagtgtttcaaagcaattgtattattgatacaattattatataattcttcgccctcaatttcccaaataacaccgttacacgaagagatagatacgtgattaatacatttatatccaacatatggtacgtaactgaatcttcccatacctttaacttctggaagttccaaactcagaaccaaatgattaagcgcagtaatatactgatccctaatttcgaagctagcgatagcctgattgtctggaccatcgtttgtcataactccggatagagaaatatattgcggcatatacaaagttggaatttgactatcgactgcgaagacattagaccgtttaatagagtcatccccaccgatcaaagaattaatgatagtattattcattttctatttaaaatggaaaaagcttacaataaactccgtagagaaatatctataatttgtgagttttccttaaagtaacagcttccgtaaacgccgtctttatctcttagtaggtttattgtatttatgaccttttccttatcttcatagaatactaaaggcaacaaagaaatttttggttcttctctaagagctacgtgagacttaaccatagaagccaacgaatccctacatattttagaacagaaataccctacttcaccacccttgtatgtctcaatactaataggtctaaaaaccaaatcttgattacaaaaccaacacttatcaattacactatttgtcttaatagacacatctgccatagatttataatactttggtagtatacaagcgagtgcttcttctttagcgggcttaaagactgctttaggtgctgaaataaccacatctggaaggcttactcgcttagccatttaattacggaactatttttttatacttctaatgagcaagtagaaaacctctcatctacaaaaacgtactcgtgtccataatcctctaccatagttacacgttttttagatctcatatgtgctaaaaagttttcccatactaattggttactattatttttcgtataatttttaacagtttgaggttttagatttttagttacagaagtgatatcgaatattttatccaaaaagaatgaataattaattgtcttagaaggagtgttttcttggcaaaagaataccaagtgcttaaatatttctactacttcattaatcttttctgtactcagattcagtttctcatcttttacttgattgattatttcaaagactaacttataatcctttttatttattctctcgttagccttaagaaaactagatacaaaatttgcatctacatcatccgtggatatttgatttttttccatgatatccaagagttccgagataatttctccagaacattgatgagacaataatctccgcaatacatttctcaaatgaataagtttattagacacgtggaagtttgactttttttgtacctttgtacatttttgaaataccgactcgcaaaaaatacaatattcatatccttgttcagatactataccgttatgtctacaaccgctacataatcgtagattcatgttaacactctacgtatctcgtcgtccaatattttatataaaaacattttatttctagacgttgccagaaaatcctgtaatatttttagttttttgggctgtgaataaagtatcgccctaatattgttaccgtcttccgccaatatagtagttaaattatccgcacatgcagaagaacaccgcttaggcggattcagtacaatgttatatttttcgtaccaactcatttaaatatcataatctaaaatagttctgtaatatgtctagcgctaatatattgatcataatcctgtgcataaattaagatacaacaatgtctcgaaatcatcgacatggcttcttccatagttagaagatcgtcgtcaaagttagcaacgtgattcatcaacatttgctgttttgaggcagcaaatactgaaccgtcgccattcaaccattcataaaaaccatcgtctgaatccattgataatttcttgtactggtttttgagagctcgcatcaatctagcatttctagctcccggattgaaaacagaaagaggatcgtacatccagggtccattttctgtaaatagaatcgtataatgtcccttcaagaagatatcagacgatccacaatcaaagaattggtctccgagtttgtaacaaactgcggactttaacctatacatgataccgtttagcataatttctggtgatacgtcaatcggagtatcatctattagagatctaaagccggtgtaacattctccaccaaacatattcttattctgacgtcgttctacataaaacatcattgctccattaacgataacaggggaatgaacagcactacccatcacattagttcccaatggatcaatgtgtgtaactccagaacatcttccatagcctatgttaggaggagcgaacaccactcttccactattgccatcgaatgccatagaataaatatccttggaattgatagaaatcggactgtcggatgttgtgatcatcttcataggattaacaactatgtatggtgccgcctgaagtttcatatcgtaactgatgccgtttataggtctagccacagaaaccaacgtaggtctaaatccaactatagacaaaatagaagccaatatctgttcctcatctgtcataacttgagagcatccagtatgaataatcttcattagatggggatctaccgcatcatcatcgttacaataaaaaattcccattctaatgttcataattgcttttctaatcatggtatgcatgtttgctctctgaatctctgtggaaattagatctgatacacctgtaatcactatcggattatcctccgtaagacgattaaccaacaacatataattataagactttacttttctaaattcataaagttgctggattaggctataggtgtctccatgtacatacgcgttctcgagcgcaggaagtttaataccgaatagtgccatcagaataggatgaatatagtaattagtttctggttttctataaataaaagacaaatcttgtgaactagacatatcggtaaaatgcatggattggaatcgtgtagtcgacagaagaatatgatgattagatggagagtatattttatctaactctttgagttggtcaccgattctaggactagctcgagaatgaataagtactaaaggatgagtacatttcacagaaacactagcattgttcaatgtgctctttacatgggtaaggagttgaaatagctcgtttctatttgttctgacaatatttagtttattcataatgttaagcatatcctgaatagtaaagttagatgtgtcatacttgttagtagttagatatttagcaattgcattcccatcatttctcaatctcgtactccaatcatgcgtggatgctacttcgtcgatggaaaccatacaatcctttttgataggctgttgagattgatcatttcctgcacgtttaggtttggtacgttgatttctagcccctgcggatataaagtcatcgtctacaatttgggacaatgaattgcatacactacaagacaaagatttatcagaagtgtgaatatgatcttcatctaccaaagaaagagtttgattagtataactagattttagtcctgcgttagatgttaaaaaaacatcgctattgaccacggcttccattatttatattcgtagtttttactcgaaagcgtgattttaatatccaatcttattacttttggaatcgttcaaaacctttgactagttgtagaatttgatctattgccctacgcgtatactcccttgcatcatatacgttcgtcaccagatcgtttgtttcggcctgaagttggtgcatatctctttcaacattcgacatgagatccttaagggccatatcgtctagattttgttgagatgctgctcctggatttggattttgttgtgctgttgtacatactgtaccaccagtaggtgtaggagtacatacagtggccacaataggaggttgagaaagtgtaaccgttggagtagtacaagaaatacttccatccgattgttgtgtacatgtagttgttggtaacgtctgagaaggttgggtagatggcggcgtcgtcgttttttgatctttattaaatttagagataatatcctgaacagcattgctcggcgtcaacgctggaaggagtgaactcgccggcgcatcagtatcttcagacagccaatcaaaaagattagacatatcagatgatgtattagtttgttgtcgtggttttggtgtaggagcagtactactaggtagaagaataggagccgatgtagctgttggaaccggctgtggagttatatgaatagttggttgtagcggttggataggctgtctgctggcggccatcatattatctctagctagttgttctcgcaactgtctttgataatacgactcttgagactttagtcctatttcaatcgcttcatcctttttcgtatccggatccttttcttcagaataatagattgacgactttggtgtagaggattctgccagcctctgtgagaacttgttaaagaagtccatttaaggctttaaaattgaattgcgattataagattaaatggcagacacagacgatattatcgactatgaatccgatgatctcaccgaatacgaggatgatgaagaagaggaagaagatggagagtcactagaaactagtgatatagatcccaaatcttcttataagattgtagaatcagcatccactcatatagaagatgcgcattccaatcttaaacatatagggaatcatatatctgctcttaaacgacgctatactagacgtataagtctatttgaaatagcgggtataatagcagaaagctataacttgcttcaacgaggaagattacctctagtttcagaattttctgacgaaacgatgaagcaaaatatgctacatgtaattatacaagagatagaggagggttcttgtcctatagtcatcgaaaagaacggagaattgttgtcggtaaacgattttgacaaagatggtctaaaattccatctagactatattatcaaaatttggaaacttcaaaaacgatattagaatttatacgaatatcgttctctaaatgtcacaatcaagtctcgcatgttcagcaatttattgtcgtactttatatcgtgttcattaacgatatcttgcaaaatagtaatgattctatcttccttcgatagatattcttcagagattattgtcttatattctttcttgttatcagatatgaatttgataagactttgaacattattgatacccgtctgtttaattttttctacagatattttagttttggcagattctatcgtatctgtcaatagacatccaacatcgacattcgacgtcaattgtctataaatcaacgtataaattttagaaataacattagcgaattgttgtgcgttgatgtcgttattctgaaacagtatgattttaggtagcattttcttaacaaagagaacgtatttattgttactcagttgaacagatgatatatccagattactaacgcatctgattccgtataccaaactttcagaagaaatggtatacaattgtttgtattcattcaatgtctctttttcagaaattagtttagagtcgaatactgcaataattttcaagagatagttttcatcagataagattttatttagtgtagatatgataaaactattgttttgttggagaacttgatacgccgcgttctctgtagtcgacgctctcaaatgggaaacaatctccattatttttttggaatcggatactatatcttcggtatcttgacgcagtctagtatacatagagttaagagagattagagtttgtacattaagcaacatgtctctaaatgtggctacaaacttttcctttttcacatcatctagtttattatataccgatttcacaacggcaccagatttaaggaaccagaatgaaaaactctgataactacaatatttcatcatagttacgattttatcatcttctatagttggtgtaatagcgcatacctttttctccaagactggaaccaacgtcataaaaatgtttaaatcaaaatccatatcaacatctgatgcgctaagaccagtctcgcgttcaagattatctttactaatggtgacgaactcatcgtataaaactctaagtttgtccattatttatttacagatttagttgtttaatttatttgtgctcttccagagttgggatagtatttttctaacgtcggtattatattattaggatctacgttcatatgtatcataatattaatcatccacgttttgataaatctatctttagcttctgaaataacgtatttaaacaaaggagaaaaatatttagctacggcatcagacgcaataacattttttgtaaatgtaacgtatttagacgacagatcttcgttaaaaagttttccatctatgtagaatccatcggttgttaacaccattcccgcgtcagattgaataggagtttgaatagtttgttttggaaatagatccttcaataacttatagttgggtgggaaaaaatcgattttatcactagactctttcttttttactatcattacctcatgaactatttcttgaatgagtatatgtattttctttcctatatcggacgcgttcattggaaaatataccatgtcgttaactataagaatatttttatcctcgtttacaaactgaataatatcagatgtagttcgtaaacgaactatatcatcaccagcacaacatctaactatatgatatccactagtttcctttagccgtttattatcttgttccatattagcagtcattccatcatttaagaaggcgtcaaaaataatagggagaaatgacattttggattctgttacaactttaccaaaattaaggatatacggacttactatctttttctcaacgtcaatttgatgaacacacgatgaaaatgtgcttctatgagattgatcatgtagaaaacaacaagggatacaatatttccgcatatcatgaaatatattaagaaatcccaccttattatatttccccaaaggatccatgcacgtaaacattatgccgttatcattaataaagacttctttctcatcggatctgtaaaagttgttactgatttttttcattccaggatctagataattaataatgatgggttttctattcttattctttgtattttggcatatcctagaccagtaaacagtttccactttggtaaaatcagcagacttttgaacgctattaaacatggcattaatggcaataactaaaaatgtaaaatatttttctatgttaggaatatggtttttcactttaatagatatatggtttttggccaaaatgatagatatttttttatccgaggatagtaaaatattattagtcgccgtctctataaaaatgaagctagtctcgatatccaattttattctagaattgataggagtcgccaaatgtaccttatacgttatatctcccttgatgcgttccatttgtgtatctatatcggacacaagatctgtaaatagttttacgttattaatcatcacggtatcgccgtcgctagataacgctaatgtaccatccaagtcccaaatggagagatttaactgttcatcgtttagaataaaatgattaccggtcatattaataaagtgttcatcgtatctagataacaacgacttataattaatgtccaagtcttgaactcgctgaatgatcttttttaacccagttagttttagattggtacgaaatatattgttaaactttgattctacagtaatgtccaaatctagttgtggaaatacttccatcaacattgtttcaaacttgataatattattatctacatcttcgtacgatccaaattccggaatagatgtatcgcacgctctggccacccagataaccaaaaagtcacacgctccaggatatacattgtataaaaagctatcgttttttagtagggtttttttctgcgtgtatacgaagggattaaaaatagtattatcaacgtaactatattccaaattattcttatgagaatagataataatatcgtccttaatatctaacaaatttcctaaatatccctttaattgagtcattcgaagcgtcaatagaatatgtctcttaactatttccggctgttgtatatttaaatgacttcgtaaaaaataatatatgggcgacttctcatctatgtaatcatatggagtgagatatagggctcgttctacctcctgccccttacccacctgtaataccaattgcggacttactatatatcgcatatttatatcgtggggtaaagtgaaaatctactaccgatgatgtaagtcttacaatgttcgaaccagtaccagatcttaatttggaggcctccgtagaactaggggaggtaaatatagatcaaacaacacctatgataaaggagaatagcggttttatatcccgcagtagacgtctattcgcccatagatctaaggatgatgagagaaaactagcactacgattctttttacaaagactttattttttagatcatagagagattcattatttgttcagatgcgttgacgctgtaaaagacgtcactattaccaaaaaaaataacattatcgtggcgccttatatagcacttttaactatcgcatcaaaaggatgcaaacttacagaaacaatgattgaagcattctttccagaactatataatgaacatagtaagaaatttaaattcaactctcaagtatccatcatccaagaaaaactcggataccagtttggaaactatcacgtttatgattttgaaccgtattactctacagtagctctggctattcgagatgaacattcatctggcatttttaatatccgtcaagagagttatctggtaagttcattatctgaaataacatatagattttatctaattaatctaaaatctgatcttgttcaatggagtgctagtacgggcgctgtaattaatcaaatggtaaatactgtattgattacagtgtatgaaaagttacaactggtcatagaaaatgattcacaatttacatgttcattggctgtggaatcaaaacttccaataaaattacttaaagatagaaatgaattatttacaaaattcattaacgagttaaaaaagaccagttcattcaagataagcaaacgcgataaggatacgctactaaaatattttacttaggactggagttagaatttatagacgactcatttcgtttatcattgttactattattactattactatcattattagtgttggcattattagtattcttcttgtcatcttgttcagaaatatacagcaatgctatacctaatactaaatacattatcatgctcgcaatggctctaacaacaacgaaccaaaatgaatttggtcgtagcttttgttcacaaaaatacataaagaaatgtctacataaatctatggcgccattggctacttgaaatagcgccagtcctcctacagattttaatatagctgtataacatgacatttattcatcatcaaaagagacagagtcaccatctgtcatatttagattttttttcatgtgttcaaagtatcctctactcatttcattataatagtttatcatacttagaattttaggacggatcaatgagtaagacttgactagatcgtcagtagtaatttgtgcatcgtctattctgcatccgcttcgtcgaataatgtatagcatcgctttgagattctccatagctatcaagtctttatacaatgacatggaaatatctgtgaatactttatacttctccaacatcgatgccttaacatcatcgcctactttagcattgaaaatacgttctattgtgtagatggatgtagcaagatttttaaacaacaatgccatcttacacgatgattgcctcaagtctccaatcgtttgtttagaacgattagctacagagtccaatgcttggctgactagcatattattatctttagaaattgtattcttcaatgaggcgtttatcatatctgtgatttcgttagtcatattacagtctgactgggttgtaatgttatccaacatatcacctatggatacggtacacgtaccagcatttgtaataatcctatctaagatgttgtatggcattgcgcagaaaatatcttctcctgtaatatctccactctcgataaatctactcagattattcttaaatgccttattctctggagaaaagatatcagtgtccatcatttcattaatagtatacgcagaaaagataccacgagtatcaattctatccaagatacttatcggttccgagtcacagataatggtttcctctccttcgggagatcctgcatagaaatatctaggacaatagtttctatactgtctgtaactctgataatctctaaagtcactaactgataccatgaaattgagaagatcaaacgctgaagtaattaatttttctgcctcgtttttactacaactagttttcatcaatgtagtgacgatgtattgtttagttacttttggtctaatactgatgatagagatattattgcttcccataatggatcttctagtagtcaccttaaagcccattgatgcgaatagcagatagataaagtcttggtatgactcctttctaatatagtacggactacctttgtcacccaactttatacccacataagccataacaacctctttaatagccgtttcatgaggtttatcagccatgagcctgagtagttggaagaatctcatgaatcccgtctcagaaagtcctatatgcatgatagatttatctttcctgggaaactctcgtatagtcatagatgaaatactctttaaagtttctgaaataagattagtaacagtcttacctccgactactctaggtaacaaacaaactctaataggtgttttctctgcggagataatatcagaaaggatagagcaataagtagtattattgtgattataaagaccgaatacataacaggtagaatttataaacatcatgtcctgaaggtttttagacttgtattcctcgtaatccataccgtcccaaaacatggatttggtaactttgatagccgtagatctttgttccttcgccaacaggttaaagaaattaataaagaatttgttgtttctatttatgtccacaaattgcacgtttggaagcgccacggttacattcactgcagcattttgaggatcgcgagtatgaagtacgatgttattgtttactggtatatctggaaagaaatctaccagtctaggaataagagattgatatcgcatagaaatagtaaagtttataatctcatcatcgaagagcattttgttaccattgtaataaatatccactctgtcatatgtataaatgaagtactgttcaaacatgatgagatgtttatatgttggcatagtagtgagatcgacgtttggtaatggcaatgtattaagattaactccataatgtctagcagcatctgcgatgttataagcgtcgtcaaagcggggtcgatcttgtattgttatatattgtctaacacctataagattatcaaaatcttgtctgcttaatacaccgttaacaatttttgccttgaattcttttattggtgcattaataacatccttatagaggatgttaaacaaataagtgttatcaaagttaagatctggatatttcttttctgctagaacatccattgagtcggagccatctggtttaatataaccaccgataaatctagctctgtattctgtatccgtcaatctaatattaagaaggtgttgagtgaaaggtggaagatcgtaaaagctgtgagtattaatgataggattagtttccgaactaatgttaattggggtattaataatatctatatttccagcgttaagtgtaacattaaacagttttaattcacgtgacgtggtatcaattaaataattaatgcccaatttggatatagcagcctgaagctcatcttgtttagttacggatcctaatgagttattaagcaatatatcgaacggatgaacgaaggttgttttaagttggtcacatactttgtaatctagacatagatgcggaagaacggtagaaactatacgaaataaatattcagagtcctctaattgatcaagagtaactattgacttaataggcatcatttatttagtattaaatgacgaccgtaccagtgacggatatacaaaacgatttaattacagagttttcagaagataattatccatctaacaaaaattatgaaataactcttcgtcaaatgtctattctaactcacgttaacaacgtggtagatagagaacataatgccgccgtagtgtcatctccagaggaaatatcctcacaacttaatgaagatctatttccagatgatgattcaccggccactattatcgaacgagtacaacctcatactactattattgacgatactccacctcctacgtttcgtagagagttattaatatcggaacaacgtcaacaacgagaaaaaagatttaatattacagtatcgaaaaatgctgaagcaataatggaatctagatctatgataacttctatgccaacacaaacaccatccttgggagtagtttatgataaagataaaagaattcagatgttagaggatgaagtggttaatcttagaaatcaacgatctaatacaaaatcatctgataatttagataattttaccaaaatactatttggtaagactccgtacaaatcaacagaagttaataagcgtatagccatcgttaattatgcaaatttgaacgggtcccccttatcagtcgaggacttggatgtttgttcggaggatgaaatagatagaatctataaaacgattaaacaatatcacgaaagtagaaaacgaaaaattatcgtcactaacgtgattattattgtcataaacattatcgagcaggcattgctaaaactcggatttgaagaaatcaaaggactgagtaccgatatcacttcagaaattatcgatgtggagatcggagatgactgcgatgctgtagcatctaaactaggaatcggtaacagtccggttcttaatattgtattgtttatactcaagatattcgttaaacgaattaaaattatttaatttaatacattcccatatccagacaacaatcgtctggattaatctgttcctgtcgtctcataccggacgacatattaatctttttattagtgggcatctttttagatggtttctttttcccagcattaactgagtcgatacctagaagatcgtgattgatctctccgaccattccacgaacttctaattggccgtctctgacggtaccataaactattttaccagcattagtaacagcttggacaatctgaccatccatcgcattgtacgatgtagtagtaactgttgttctacgtctaggagcaccagaagtatttttggagcccttggatgttgatgtagaagaagacgaggattttgattttggtttacatgtaatacattttgaactctttgattttgtatcacatgcgccggcagtcacatctgtttgagaattaagattattgttgcctcctttgacggctgcatctccaccgatttgcgctagtagatttttaagctgtggtgtaatcttattaactgtttcgatataatcatcgtaactgcttctaacggctaaattttttttatccgccatttagaagctaaaaatatttttatttatgcagaagatttaactagattatacaatgaactaatatgatccttttccagattatttacaaacttggtattttttggttctggaggaggcgaatttaaattcggacttggattcggattttgtaagttcttgatcttattatacatcgagtataggatggcgacagtaactgctacacaaataccgatcaaaagaagaataccaatcatttattgacaataacttcactattgatcaagtatgcaatatatcatcttttcactaaataagtagtaataatgattcaacaatgtcgagatatatggacgataataatttagttcatggaaatatcgctatgattggtgtgaatgactccgctaactctgtggggtgcgcagtgctttccccacatagaataaattagcattccgactgtgataataataccaagtataaacgccataatactcaatactttccatgtacgagtgggactggtagacttactaaagtcaataaaggcgaagatacacgaaagaatcaaaagaatgattccagcgattagcacgccggaaaaataatttccaatcataagcatcatgtccatttaactaataaaaattttaaatcgccgaatgaacaaagtggaatataaaccatataaaaacaatagtttgtactgcaaaaataatatctatttttgttttcgaagatatggtaaaattaaatagtagtacacagcatgttataactaacagcagcaacggctcgtaattacttatcatttactagacgaaaaggtggtgggatattttcttgctcaaataatacgaatatatcacccatccattttatgcgatgtttatatactctaatctttaatagatctatagacgacgggtttaccaacaatatagattttatcgattcatctaatttaaacccttccttaaacgtgaatgatctattatctggcataacgatgaccctacctgatgaatcggacaatgtactgggccatgtagaataaattatcaacgaattatcgtctacgaacatttatatcatttgttttaattttaggacgcgaataaatggatataaaatagaaaataacagatattacaaccagtgttatggccgcgcccaaccaggtaggcagttttattttatcttttactacaggttctcctggatgtacgtcaccaacggcggacgtagttctagtacaattagacgtaagttccgcttgggaattttttaacgctaaagagttaacgttaatcgtgcacccaacgtatttacatctagttcgttgaacatcttgattataatataaccattttctatctctagattcgtcagtgcactcatgtaaccaacataccctaggtcctaaatatttatctccggaattagattttggataattcgcgcaccaacaatttctatttcctttatgatcgttacaaaagacgtataatgccgtatccccaaaagtaaaataatcaggacgaataattctaataaactcagaacaatatctcgcatccatatgtttggagcaaatatcggaataagtagacatagccggtttccgttttgcacgtaaccattctaaacaattggggtttccaggatcgtttctacaaaatccagtcatgaaatcgtcacaatgttctgtcttgtaattattattaaatatttttggacagtgtttggtatttgtcttagaacaacattttgccacgctatcactatcgcccaggagataatccttttttataaaatgacatcgttgcccggatgctatataatcagtagcgtgttttaaatccttaatatattcaggagttacctcgttctgataatagattaatgatccaggacgaaatttgaaagaactacatggttctccatgaattaatacatattgtttagcaaattcaggaactataaaactactacaatgatctatcgacataccatctatcaaacaaaacttgggtttaatttctcccggagatgtttcataatagtacgtataactttcttctgcaaacttaacagctctattatattcaggataattaaaacctaattccatatatttgtctcgtatatctgctattcctggtgctattttgattctattaagagtaacagctgcccccattcttaataatcgtcagtatttaaactgttaaatgttggtatatcaacatctaccttatttcccgcagtataaggtttgttgcaggtatactgttcaggaatggttacatttatacttcttctatagtcctgtctttcgatgttcatcacatatgcaaagaacagaataaacaaaataatgtaagaaataatattaaatatctgtgaattcgtaaatacattgattgccataataattacagcagctacaatacacacaatagacattcccacagtgttgccattacctccacgatacatttgagttactaagcaataggtaataactaagctagtaagaggcaatagaaaagatgagataaatatcatcaatatagagattagaggagggctatatagagccaagacgaacaaaatcaaaccgagtaacgttctaacatcattatttttgaagattcccaaataatcattcattcctccataatcgttttgcatcatacctccatctttaggcataaacgattgctgctgttcctctgtaaataaatctttatcaagcactccagcacccgcagagaagtcgtcaagcatattgtaatatcttaaataactcatttatatattaaaaaatgtcactattaaagatggagtataatctttatgccgaactaaaaaaaatgacttgtggtcaacccctaagtctttttaacgaagacggggatttcgtagaagttgaaccgggatcatcctttaagtttctgatacctaagggattttacgcctctccttccgtaaagacgagtctagtattcgagacattaacaacgaccgataataaaatcactagtatcaatccaacaaatgcgccaaagttatatcctcttcaacgcaaagtcgtatctgaagtagtttctaatatgaggaaaatgatcgaatcaaaacgtcctctatacatcactcttcacttggcgtgtggatttggtaagactattaccacgtgttatcttatggctacacacggtagaaaaaccgtcatttgcgtacccaataaaatgttaatacatcaatggaagacacaggtagaggcagtcggattggaacataagatatccatagatggagtaagtagtctattaaaggaactaaagactcaaagtccggatgtattaatagtagtcagtagacatctgacaaacgatgccttttgtaaatatatcaataagcattatgatttgttcatcttggatgaatcacatacgtataatctgatgaacaatacagcagttacaagatttttagcgtattatcctccgatgatgtgttattttttaactgctacacctagaccatctaaccgaatttattgtaacagtattattaatattgccaagttatccaatctaaaaaaaactatctatgcagtagatagtttttttgagccatattccacagataatattagacatatggtaaaacgactagatggaccatctaataaatatcatatatataccgagaagttattatctgtagacgagcctagaaatcaacttattcttgataccctggtagaagaattcaagtcaggaactattaatcgcattttagttattactaaactacgtgaacatatggtattattctacaaacgattattagattttttcggaccagaggttgtatttataggagacgcccaaaatagacgtactccagatatggtcaaatcaatcaaggaactaaatagatttatattcgtatccaccttattttattccggtactggtttagatattcctagtttggattcgttgttcatttgctcggcagtaatcaacaatatgcaaatagagcaattactagggagggtatgtcgagaaacagaactattagataggacggtatatgtatttcctaacacatccatcaaagaaataaagtacatgataggaaatttcatgcaacgaattattagtctgtctgtagataaactaggatttaaacaaaaaagttatcggaaacatcaagaatccgatcccacttctgcatgtacaacatcatccagagaagaacgtgtattaaatagaatatttaactcgcaaaatcgttaagaagtttaagcgacgatccgcatgctgcgcaggccagtgtattacccctcatagtattaatataatccaatgatacttttgtgatgtcggaaatcttaaccaatttagactgacaggcagaacacgtcatgcaatcatcatcgtcatcgataactgtagtcttgggcttctttttgcgactcttcattccggaacgcacattggtgctatccatttaggtagtaaaaaataagtcagaatatgccctataacacgatcgtgcaaaacctggtatatcgtctctatctttatcacaatatagtgtatcgacatttttattattattgacctcgtttatcttggaacatggaatgggaacatttttgttatcaacggccatctttgccttaattccagatgttgtaaaattataactaaacagtctatcatcgacacaaatgaaattcttgtttagacgtttgtagtttacgtatgcggctcgttcgcgtctcattttttcagatattgcaggtactataatattaaaaataagaatgaaataacataggattaaaaataaagttatcatgacttctagcgctgatttaactaacttaaaagaattacttagtctgtacaaaagtttgagattttcagattctgcggctatagaaaagtataattctttggtagaatggggaacatctacttactggaaaataggcgtgcaaaaggtagctaatgtcgagacgtcaatatctgattattatgatgaggtaaaaaataaaccgtttaatattgatccgggctattacattttcttaccggtatattttgggagcgtctttatttattcgaagggtaaaaatatggtagaacttggatctggaaactcttttcaaataccagatgatatgcgaagtgcgtgtaacaaagtattagacagcgataacggaatagactttctgagatttgttttgttaaacaatagatggataatggaagatgctatatcaaaatatcagtctccagttaatatatttaaactagctagtgagtacggattaaacatacccaaatatttagaaattgaaatagaggaagacacattatttgacgacgagttatactctattatagaacgctctttcgatgataaatttccaaaaatatccatatcgtatattaagttgggagaacttagacggcaagttgtagactttttcaaattctcattcatgtatattgagtccatcaaggtagatcgtataggagataatatttttattcctagcgttataacaaaatcaggaaaaaagatattagtaaaagatgtagaccatttaatacgatccaaggttagagaacatacatttgtaaaagtaaaaaagaaaaacacattttccattttatacgactatgatggaaacggaacagaaactagaggagaagtaataaaacgaattatagacactataggacgagactattatgttaacggaaagtatttctctaaggttggtagtgcaggcttaaagcaattgactaataaattagatattaatgagtgcgcaactgtcgatgagttagttgatgagattaataaatccggaactgtaaaacgaaaaataaaaaaccaatcagcatttgatttaagcagagaatgtttgggatatccagaagcggattttataacgttagttaataacatgcggttcaaaatagaaaattgtaaggttgtaaatttcaatattgaaaatactaattgtttaaataacccgagtattgaaactatatatggaaactttaaccagttcgtctcaatctttaatgtcgtcaccgatgtcaaaaaaagattattcgagtgaaataatatgcgcctttgatataggtgcaaaaaatcctgccagaactgttttagaagtcaaggataactccgttagggtattggatatatcaaaattagactggagttctgattgggaaaggcgcatagctaaagatttgtcacaatatgaatacactacagttcttctagaacgtcagcctagaaggtcgccgtatgttaaatttatctattttattaaaggctttttatatcatacatcggctgccaaagttatttgcgtctcgcctgtcatgtctggtaattcatatagagatcgaaaaaagagatcggtcgaagcatttcttgattggatggacacattcggattgcgagactccgttccggatagacgcaaattagacgatgtagcggatagtttcaatttggctatgagatacgtattagataaatggaatactaattatacaccttataataggtgtaaatctagaaattacataaaaaaaatgtaataacgttagtaacgccattatggataatctatttacctttctacatgaaatagaagatagatatgccagaactatttttaactttcatctaataagttgcgatgaaataggagatatatatggtcttatgaaagaacgcatttcctcagaggatatgtttgataatatagtgtataataaagatatacatcctgccattaagaaactagtgtattgcgacatccaacttactaaacacattattaatcagaatacgtatccggtatttaacgattcttcacaagtgaaatgttgtcattatttcgacataaactcagataatagcaatattagctctcgtacagtagagatatttgagagggaaaagtcatctcttgtatcatatattaaaactaccaataagaagagaaaggtcaattacggcgaaataaagaaaactgttcatggaggcactaatgcaaattacttttccggtaaaaagtctgacgagtatctgagtactacagttagatccaacattaatcaaccttggatcaaaaccatctctaagaggatgagagttgatatcattaatcactctatagtaacgcgtggaaaaagctctatattacaaactatagaaattatttttactaatagaacatgtgtgaaaatattcaaggattctactatgcacattattctatccaaggacaaggatgaaaaggggtgtatacacatgattgacaaattattctatgtctattataatttatttctgttgttcgaagatatcatccaaaacgagtactttaaagaagtagctaatgttgtaaaccacgtactcacggctacggcattagatgagaaattattcctaattaagaaaatggctgaacacgatgtttatggagttagcaatttcaaaatagggatgtttaacctgacatttattaagtcgttggatcataccgttttcccctctctgttagatgaggatagcaaaataaagttttttaaggggaaaaagctcaatattgtagcattacgatctctggaggattgtataaattacgtgactaaatccgagaatatgatagaaatgatgaaggaaagatcgactattttaaatagcatagatatagaaacggaatcggtagatcgtctaaaagaattgcttctaaaatgaaaaaaaacactaattcagaaatggatcaacgactagggtataagtttttggtgcctgatcctaaagccggagttttttatagaccgttacatttccaatatgtatcgtattctaattttatattgcatcgattgcatgaaatcttgaccgtcaagcggccactcttatcgtttaagaataatacagaacgaattatgatagaaattagcaatgttaaagtgactcctccagattactcacctataatcgcgagtattaaaggtaagagttatgacgcattagccacgttcactgtaaatatctttaaagaggtaatgaccaaagagggtatatccatcactaaaataagtagttatgagggaaaagattctcatttgataaaaattccgctactaataggatacgggaataaaaatccacttgatacagccaagtatcttgttcctaatgtcataggtggagtctttatcaataaacaatctgtcgaaaaagtaggaattaatctagtagaaaagattacaacatggccaaaatttagggttgttaagccaaactcattcactttctcgttttcctccgtatcccctcctaatgtattaccgacaagatatcgccattacaagatatctctggatatatcacaattggaagcgttgaatatatcatcgacaaagacatttataacggtcaatattgttttgctgtctcaatatttatctagagtgagtctagaattcattagacgtagtttatcatacgatatgcctccagaagttgtctatctagtaaacgcgataatagatagtgctaaacgaattactgaatctattactgactttaatattgatacatacattaatgacctggtggaagctgaacacattaaacaaaaatctcagttaacgatcaacgagttcaaatatgaaatgctgcataactttttacctcatatgaactatacacccgatcaactaaagggattttatatgatatctttactaagaaagtttctctactgtatcttccacacttctagatatccagatagagattcgatggtttgtcatcgcatcctaacgtacggcaaatattttgagacgttggcacatgatgaattagagaattacataggcaacatccgaaacgatatcatgaacaatcacaagaacagaggcacttacgcggtaaacattcatgtactaacaactcccggacttaatcacgcgttttctagcttattgagtggaaagttcaaaaagtcagacggtagttatcgaacacatcctcactattcatggatgcagaatatttctattcctaggagtgttggattttatccggatcaagtaaagatttcaaagatgttttctgtcagaaaataccatccaagtcaatatctttacttttgttcatcagacgttccggaaagaggtcctcaggtaggtttagtatctcaattgtctgtcttgagttccattacaaatatactaacgtctgagtatttggatttggaaaagaaaatttgtgagtatatcagatcatattataaagatgatataagttactttgaaacaggatttccaatcactatagaaaatgctctagtcgcatctcttaatccaaatatgatatgtgattttgtaactgactttagacgtagaaaacggatgggattcttcggtaacttggaggtaggtattactttagttagggatcacatgaatgaaattcgcattaatattggagcgggaagattagtcagaccattcttggttgtggataacggagagctcatgatggatgtgtgtccggagttagaaagcagattagacgacatgacattctctgacattcagaaagagtttccgcatgtcatcgaaatggtagatatagaacaatttacttttagtaacgtatgtgaatcggttcaaaaatttagaatgatgtcaaaggatgaaagaaagcaatacgatttatgtgactttcctgccgaatttagagatggatatgtagcatcttcattagtgggaatcaatcacaattctggacccagagctattcttggatgtgctcaagctaaacaagctatctcttgtctgagctcggatatacgaaataaaatagacaatggaattcatttgatgtatccagagaggccaatcgtgattagtaaggctttagaaacttcaaagattgcggctaattgcttcggccaacatgttactatagcattaatgtcgtacaaaggtatcaatcaagaggatggaattatcatcaaaaaacaatttattcagagaggcggtctcgatattgttacagccaagaaacatcaagtagaaattccattggaaaactttaataacaaagaaagagataggtctaacgcctattcaaaattagaaagtaatggattagttagactgaatgctttcttggaatccggagacgctatggcacgaaatatctcatcaagaactcttgaagatgattttgctagagataatcagattagcttcgatgtttccgagaaatataccgatatgtacaaatctcgcgttgaacgagtacaagtagaacttactgacaaagttaaggtacgagtattaaccatgaaagaaagaagacccattctaggagacaaatttaccactagaacgagtcaaaagggaacagtcgcgtatgtcgcggatgaaacggaacttccatacgacgaaaatggtatcacaccagatgtcattattaattctacatccatcttctctagaaaaactatatctatgttgatagaagttattttaacagccgcatattctgctaagccgtacaacaataagggagaaaaccgacctgtctgttttcctagtagtaacgaaacatccatcgatacatatatgcaattcgctaaacaatgttatgagcattcaaatccgaaattgtccgatgaagaattatcggataaaatcttttgtgaaaagattctctatgatcctgaaacggataagccttatgcatccaaagtattttttggaccaatttattacttgcgtctgaggcatttaactcaggacaaggcaaccgttagatgtagaggtaaaaagacgaagctcattagacaggcgaatgagggacgaaaacgtggaggaggtatcaagttcggagaaatggagagagactgtttaatagcgcatggtgcagccaatactattacagaagttttgaaagattcggaagaagattatcaagatgtgtatgtttgtgaaaattgtggagacatagcagcacaaatcaagggtattaatacatgtcttagatgttcaaaacttaatctctctcctctcttaacaaaaattgataccacgcacgtatctaaagtatttcttactcaaatgaacgccagaggcgtaaaagtcaaattagatttcgaacgaaggcctccttcgttttataaaccattagataaagttgatctcaagccgtcttttctggtgtaatattctagtttggtagtagatacatatcaatatcatcaaattcgagatccgaattataaaatgggcgtggattgttaactatagaatcggacgtctgatattcgaaaatctgtggagtttcaggttttggtggaggtgtaactgctacttgggatactgaagtctgatattcagaaagctgtggatgttctggttcggcatccaccgatggtgtcacatcactaatcggttcggtaacgtctgtggatggaggtgctacttctacagaacctgtagcctcagttgtcaacggagatacatttttaatgcgagaaaatgtataatttggtaatggtttcttatgtggatctgaagaagaggtaagatatctactagaaagataccgatcacgttctagttctcttttgtagaacttaactttttctttctccgcatctagttgatattccaacctcttcacgttactacgttcagattccaattcacgttcgcatgggttacctccgcagtttttacgagcgatttcacgttcagccttcatgcgtctctccctctctctatcgagtttatcagagcagtctttctgaaggcgatcgaactccataaatttctccaacgctttgattgtttccatagatttccgaagttcagcttttaggactgtgattctttttctttcgaattcacagctggatgtacaaccgtttccattaccgccatctctaagtttcttttctagatcggcaacatttcatccccatgccttttacattcctcgagtctactgtcgtcgaaatatcgttccagctccttttcgacatcaataactttagcacgttgtctctcaagctctcttttgtagttatctgattccctggcacgtttaagatcttcatgcaattgagtcagctcttaacttcctctcttgcttcttcgtcatagtacgcgcaatcactgtgagatccattgttaccacgtctacactcggcgagctcgcgtttaagagattcaatttcccgtttgtattggtccatgtttccattgctaccaccattagatttacaggctgctagttgtcgttcgagatcagaaatacgggttttcttggaattgatttcgtcgatgtacttggcatcgaaacacttattaagttctttttccaattctacgattttatttctttcgcgagtcaattccctcctgtagtaactatctgttttgtcagattcacgctctctacgtagactttcttgcaagttactaatttgttccctagcacgtccgagtttagttttatatgctgaatagagttctgattcatcctttgagcagatctctagcgatcgtttaagattcctaattctagtctttagcctatttacctcctcagaagatgttccgttaccgttgcgtttacactcgttaagctgtctatcaagatccatgattctatctctaagacgttgcatctctctttccatatcagcattgctttcattattacgtctgcagtcactcaactgtctttcaatatctgagattctatctctaagacgtcgcatctctctctgtttcggcattggtttcattattacgtttacagtcgttcaactgtctttcaagatctgatattctagattggagtctgctaatctctgtagcattttcacggcattcactcagttgtctttcaagatctgaaattttagattggagtctgctaatctctgtaagatttcctcctccgctctcgatgcagtcggtcaacttattctctagttctctaatacgcgaacgcagtgcatcaacttcttgcgtgtcttcctggttgcgtgtacattcatcgagatctctaacgcgtcgtcgttcttcctcaagttctctgcgtactacagaaagcgtgtccctatcttgttgatatttagcaatttctgattctagagtactgattttgcttacgtagttactaatagttgtcttggccttatcaagatcctccttgtatttgtcgcattccttgatatccctacgaagtctggacagttcccattcgacattacgacgtttatcgatttcagctcggagatcgtcatcgcgttgttttagccacatacgactgagttcaagttctcgttgacaagatccatctacttttccattcctaatagtatccagttccttttctagttctgaacgcatttctcgttccctatcaagcgattctctcaattctcggatagtcttcttatcaatttctaataaatctgaaccatcatctgtcccattttgaatatccctgtgttctttgatctcttttgtaagtcggtcgattctttcggttttataaacagaatccctttccaaagtcctaatcttactgagtttatcactaagttctgcattcaattcggtgagttttctcttggcttcttccaactctgttttaaactctccactatttccgcattcttcctcgcatttatctaaccattcaattagtttattaataactagttggtaatcagcgattcctatagccgttcttgtaattgtgggaacataattaggatcttctaatggattgtatggcttgatagcatcatctttatcattattagggggatggacaaccttaattggttggtcctcatctcctccagtagcgtgtggttcttcaataccagtgttagtaataggcttaggcaaatgcttgtcgtacgcgggcacttcctcatccatcaagtatttataatcgggttctacttcagaatattcttttctaagagacgcgacttcgggagttagtagaagaactctgtttctgtatctatcaacgctggaatcaatactcaagttaaggatagcgaatacctcatcgtcatcatccgtatcttctgaaacaccatcatatgacatttcatgaagtctaacgtattgataaatagaatcagatttagtattaaacagatccttaacctttttagtaaacgcatatgtatattttagatctccagatttcataatatgatcacatgccttaaatgtcagtgcttccatgatataatctggaacactaatgggtgacgaaaaagatacagcaccatatgctacgttgataaataaatctgaaccactaagtagataatgattaatgttaagaaagaggaaatattcagtgtataggtatgtcttggcgtcatatcttgtactaaacacgctaaacagtttgttaatgtgatcaatttccaatagattaattagagcagcgggaataccaacaaacatattaccacatccgtattttctatgaatatcacatatcatgttaaaaaatcttgatagaagagcgaatatctcgtctgacttaatgagtcgtagttcagcagcaacataagtcataactgtaaatagaacatactttcctgtagtgttgattctagactccacatcaacaccattattaaaaatagttttatatacatctttaatctgctctccgttaatcgtcgaacgttctagtatacggaaacactttgatttcttatctgtagttaatgacttagtgatatcacgaagaatattacgaattacatttcttgtttttcttgagagacctgattcagaactcaactcatcgttccatagtttttctacctcagtggcgaaatctttggagtgcttggtacatttttcaataaggttcgtgacctccatttattataaaaaatttattcaaaacttaactacaatcgggtaattataagatcgtagatctcccatgtggcggaatactaccatctatcgcatgtggatggacagtaggtaatggccatgggaacagtaatgtttgcatatttatctttcttgctagtattactgcatattgtcccaatgtttcgatgtgatgttctaacctatcaactgccgctgtatcacaacaatagtgtccgatgaaattaagattatgatccaatgtgtttaatatatgattatcaagtcttatacgatccgcgtcttttttgacaggatcaggttcttctacaggaagaagtttcggcctcttatgatattcatgtctgggaaacggtggtctagggtgaggctccggtatcggagtgggttttggattataatcatcatcgtctatgacatcatcttcgacttcgatatttattttgctatcttgatgatgtcctgtatcagttgcattttcagcactcgactgaatattagcgcattcattgtctattattaccatatttctaaacccaaaatgtatgtgttgaacatcagtactatcgttgatgagtcttatagcatgaattcgcttatcgttatcgggtttatcttctgtcaccttagcaattccttttttattaaactctacataatcatatccatttctattgtttgttctaatataaacgagtatagcatcattgctaaatttttcaatagtatcaaaaacagaatatcctaaaccatataatatatattcaggaacactcaaactaaatgtccaggattctcctaaatacgtaaactttaatagtgcgaaatcattcaaaaatctaccacttatagatagatagtacataaatgcgtatagtagtctacctatctctttattatgaaaaccggcattacgatcatatatgtcgtgatatacctgtgatccgtttacgttaaaccataaatacatgggtgatcctataaacatgaatttatttctaattctcagagctatagttaattgaccgtgtaatatttgcttacatgcatacttgatacgcttattaataagatttttatcattgctcgttatttcagaatcgtatatataaggagtaccatcgtgattcttaccagatattatacaaaatactatatataaaatatattgacccacgttagtaatcatataaatgtttaacgttttaaattttgtattcaatgatccattatcatacgctatcatggtcttgtaatattcattctttaaaatataatattgtgttagccattgcattggagctcctaatggagattttctattctcatccattttaggataggctttcataaagtccctaataacttcgtgaataatgtttctatgttttctactgatgcatgtatttgcttcgatttttttatcccatgtttcatctatcatagatttaaacgcagtaatgctcgcaacattaacatcttgaaccgttggtacaattccgttccataaatttataatgttcgccatttatataactcattttttgaatatacttttaattaacaaaagagttaagttactcatatggacgccgtccagtctgaacatcaatctttttagccagagatatcatagccgctcttagagtttcagcgtgattttccaacctaaatagaacttcatcgttgcgtttacaacacttttctatttgttcaaactttgttgttacattagtaatctttttttccaaattagttagccgttgtttgagagtttcctcattgtcgtcttcatcggctttaacaattgcttcgcgtttagcctctggctttttagcagcctttgtagaaaaaaattcagttgctggaattgcaagatcgtcatctccggggaaaagagttccgtccatttaaagtacagattttagaaactgacactctgcgttatttatatttggtacaacacatggattataaatattgatgttaataacatcagaaaatgtaaagtctatacattgttgcatcgtgttaaattttctaatggatctagtattattgggtccaacttctgcctgaaatccaaatatggaagcggatacaaaaccgtttcctggataaaccacacatctccacttttgctttacatcagaaattgtgtcgttgacatcttgaactctcctatctaatgccggtgttccacctatagattttgaatattcgaatgctgcatgagtagcattaaattccttaatattgccataattttcatatattgagtaaccctggataaaaagtaaacacaccgcagccgtcgctaccacaataaaaaaaattgatagagagttcatttataatctattagaagctgacaaaatttttttacacgcatcagacaatgctttaataaatagttcaacatctacttttgtcatatcgaaccgatggtatgattctaacctagaattacatccgaaaaagttgactatgttcatagtcattaagtcattaacaaacaacattccagactctggattataagacgatactgtttcgtcacaattacctaccttaatcatgtgattatgaatattggctattagagcaccttctaagaaatctataatatctttgaaacacgatttaaaatcaaaccacgaatatacttctacgaagaaagttagtttacccataggagaaataactataaatggagatctaaatacaaaatccggatctatgatagttttaacattattatattctctattaaatacctccacatctaaaaatgttaattttgaaactatgtcttcgtttattaccgtacctgaactaaacgctataagctctattgtttgagaactctttaaacgatattcttgaaatacatgtaacaaagtttcctttaactcggtcggtttatctaccatagttacagaatttgtatccttatctataatataataatcaaaatcgtataaagttatataattatcgcgttcagattgtgatcttttcaaatagactaaaaaccccatttctctagtaagtatcttatgtatatgtttgtaaaatatcttcatggtgggaatatgctctaccgcagttagccattcctcattgacagcggtagatgtattagacaaaactattccaatgtttaacaagggccattttacgagattattaaatccttgtttgataaatgtagccaatgagggttcgagttcaacgacgattgaattctcttcccgcggatgctgcatgatgaacgacgggatgttgttcgattgatttggaattctttttcgactttttgtttatattaaatattttaaaatttatagcggatagcaattcatgtaccacggataatgtagacgcgtattgcgcatcgatatctttattattagataaatttatcaataaatgtgagaagtttgcctcgttaaggtcttccatttaaatattatataaacatttgtgtttgtatcttattcgtcttttatggaatagttttttactagtaaagctgcaattacacactttgtccgtaaaacataaatataaacaccagcttttatcaatcgttccaaaaagtcgacggcggacatttttaacatggcatctattttaaatacacttaggtttttggaaaaaacatcattttataattgtaacgattcaataactaaagaaaagattaagattaaacataagggaatgtcatttgtattttataagccaaagcattctaccgttgttaaatacttgtctggaggaggtatatatcatgatgatttggttgtattggggaaggtaacaattaataatctaaagatgatgctattttacatggatttatcatatcatggagtgacaagtagtggagcaatttacaaattgggatcgtctatcgatagactttctctaaataggactattgttacaaaagttaataattatgatgatacattttttgacgacgatgattgatcgctattgcacaattttgtttttgtactttctaatatagtgtttaggttctttttcatatgagaatattgatttactaaaatatctatgtttaacttttgttctatgacgtccttatcggcggtatcggtacatatacgtaattcaccttcacaaaatacggagtcttcgataataatagccaatcgattattggatctagctgtctgtatcatattcaacatgtttaatatatcctttcgtttcccctttacaggcatcgatcgtagcatattttccgcgtctgatatggaaatgttaaaactacaaaaatgcgtaatgttagcccgtcctaatattggtacgtgtctataagtttggcatagtagaataatagacgtgtttaaatgccttccaaagtttaagaattctattagagtattgcattttgatagtttatcgcctacatcatcaaaaataagtaaaaagtgtgctgattttttatgattttgtgcgacagcaatacatttttctatgttacttttagttcgtatcagattatattctagagattcctgactactaacgaaattaatatgatttggccaaatgtatccatcataatctgggttataaacgggtgtaaacaagaatatatgtttatattttttaactagtgtagaaaacagagatagtaaatagatagtttttccagatccagatcctcctgttaaaaccattctaaacggcatttttaataaattttctcttgaaaattgtttttcttggaaacaattcataattatatttacagttactaaattaatttgataataaatcaaaatatggaaaactaaggttgttagtagggaggagaacaaagaaggcacatcgtgatataaataacatttattatcatgatgacaccagaaaacgacgaagagcagacatctgtgttctccgctactgtttacggagacaaaattcagggaaagaataaacgcaaacgcgtgattggtctatgtattagaatatctatggttatttcactactatctatgattaccatgtccgcgtttctcatagtgcgcctaaatcaatgcatgtctgctaacgaggctgctattactgacgccgctgttgccgttgctgctgcatcatctactcatagaaaggttgcgtctagcactacacaatatgatcacaaagaaagctgtaatggtttatattaccagggttcttgttatatattacattcagactaccagttattctcggatgctaaagcaaattgcactgcggaatcatcaacactacccaataaatccgatgtcttgactacctggctcattgattatgttgaggatacatggggatctgatggtaatccaattacaaaaactacatccgattatcaagattctgatgtatcacaagaagttagaaagtatttttgtgttaaaacaatgaactaatatttatttttgtacattaataaatgaaatcgcttaatagacaaactgtaagtaggtttaagaagttgtcggtgccggccgctataatgatgatactctcaaccattattagtggcataggaacatttctgcattacaaagaagaactgatgcctagtgcttgcgccaatggatggatacaatacgataaacattgttatttagatactaacattaaaatgtctacagataatgcggtttatcagtgtcgtaaattacgagctagattgcctagacctgatactagacatctgagagtattgtttagtattttttataaagattattgggtaagtttaaaaaagaccaatgataaatggttagatattaataatgataaagatatagatattagtaaattaacaaattttaaacaactaaacagtacgacggatgctgaagcgtgttatatatacaagtctggaaaactggttaaaacagtatgtaaaagtactcaatctgtactatgtgttaaaaaattctacaagtgacaacaaaaaatgaattaataataagtcgttaacgtacgccgccatggacgccgcgtttgttattactccaatgggtgtgttgactataacagatacattgtatgatgatctcgatatctcaatcatggactttataggaccatacattataggtaacataaaaactgtccaaatagatgtacgggatataaaatattccgacatgcaaaaatgctactttagctataagggtaaaatagttcctcaggattctaatgatttggctagattcaacatttatagcatttgtgccgcatacagatcaaaaaataccatcatcatagcatgcgactatgatatcatgttagatatagaagataaacatcagccattttatctattcccatctattgatgtttttaacgctacaatcatagaagcgtataacctgtatacagctggagattatcatctaatcatcaatccttcagataatctgaaaatgaaattgtcgtttaattcttcattctgcatatcagacggcaatggatggatcataattgatgggaaatgcaatagtaattttttatcataaaagttgtaaagtaaataataaaacaataaatattgaactagtagtacgtatattgagcaatcagaaatgatgctggtacctcttatcacggtgaccgtagttgcgggaacaatattagtatgttatatattatatatttgtaggaaaaagatacgtactgtctataatgacaataaaattatcatgacaaaattaaaaaagataaagagttctaattccagcaaatctagtaaatcaactgatagcgaatcagactgggaggatcactgtagtgctatggaacaaaacaatgacgtagataatatttctaggaatgagatattggacgatgatagcttcgctggtagtttaatatgggataacgaatccaatgttatggcgcctagcacagaacacatttacgatagtgttgctggaagcacgctgctaataaataatgatcgtaatgaacagactatttatcagaacactacagtagtaattaatgaaacggagactgttgaagtacttaatgaagataccaaacagaatcctaactattcatccaatcctttcgtaaattataataaaaccagtatttgtagcaagtcaaatccgtttattacagaacttaacaataaatttagtgagaataatccgtttagacgagcacatagcgatgattatcttaataagcaagaacaagatcatgaacacgatgatatagaatcatcggtcgtatcattggtgtgattagtttcctttttataaaattgaagtaatatttagtattattgctgccgtcacgttgtacaaatggagatattccctgtattcggcatttctaaaattagcaattttattgctaataatgactgtagatattatatagatacagaacatcaaaaaattatatctgatgagatcaatagacagatggatgaaacggtacttcttaccaacatcttaagcgtagaagttgtaaatgacaatgagatgtaccatcttattcctcatagattatcgacgattatactctgtattagttctgtcggaggatgtgttatctctatagataatgacatcaatggcaaaaatattctaacctttcccattgatcatgctgtaatcatatccccactgagtaaatgtgtcgtagttagcaagggtcctacaaccatattggttgttaaagcggatatacctagcaaacgattggtaacatcgtttacaaacgacatactatatgtaaacaatctgtcactgattaattatttgccgttgtctgtattcattattagacgagtcaccgactatttggatagacacatatgcgatcagatatttgctaataataagtggtattcccttataaccatcgacgataagcaatatcctattccatcaaactgtataggtatgtcctctgccaagtacataaattctagcatcgagcaagatactttaatccatgtttgtaacctcgagcatccgttcgactcagtatacaaaaaaatgcagtcgtacaattctctacctatcaaggaacaaatattgtacggtagaattgataatataaatatgagcattagtatttctgtggattaatagatttctagtatggggatcattaatcatctctaatctctaaatacctcataaaacgaaaaaaaagctattatcaaatactgtacggaatggattcattctcttctctttttatgaaactctgttgtatatctactgataaaactggaagcaaaaaatctgatagaaagaataagaataagatcaaggattatatggaacacgattattataaaataacaatagttcctggttcctcttccacgtctactagctcgtggtattatacacatgcctagtaatagtctctttgcgttgacggaaagcagactagaaataacaggctaaaatgttcagacaccataatagttcccaacccagataataacagagttccatcaacacattcctttaaactcaatcccaaacccaaaaccgttaaaatgtatccggccaattgatagtagataatgaggtgtacagcgcatgataatttacacagtaaccaaaatgaaaatactttagtaattataagaaatatagacggtaatgtcatcatcaacaatccgataatatgcctgagagtaaacattgacggataaaacaaaaatgctccgcataactctatcatggcaataacacaaccaaatacttgtaagattcctaaattagtagaaaatacaacgaatatcgatgtataagtgatctcgagaaataataagaataaagtaatgcccgtaaagataaacatcaacattgtttggtaatcattaaaccaattagtatgaagttgaactaatttcacagtagattttattccagtgttatcctcgcatgtataagtacctggtaagatatctttatattccataatcaatgagacatcactatctgataacgaatgaagtctagcactagtatgccatttacttaatattgtcgtcttggaagttttattataagttaaaatatcatggttatccaatttccatctaatatactttgtcggattatctatagtacacggaataatgatggtatcattacatgctgtatactctatggtctttgtagttgttataacaaccaacgtatagaggtatatcaacgatattctaactcttgacattttttatttatttaaaatgatacctttgttatttattttattctattttgctaacggtattgaatggcataagtttgaaacgagtgaagaaataatttctacttacttattagacgacgtattatacacgggtgttaatggggcggtatacacattttcaaataataaactaaacaaaactggtttaactaataataattatataacaacatctataaaagtagaggatgcggataaggatacattagtatgcggaaccaataacggaaatcccaaatgttggaaaatagacggttcagacgacccaaaacatagaggtagaggatacgctccttatcaaaatagcaaagtaacgataatcagtcacaacggatgtgtactatctgacataaacatatcaaaagaaggaattaaacgatggagaagatttgacggaccatgtggttatgatttattcacggcggataacgtaattccaaaagatggtttacgaggagcattcgtcgataaagacggtacttatgacaaagtttacattcttttcactgatactatcggctcaaagagaattgtcaaaattccgtatatagcacaaatgtgcctaaacgacgaaggtggtccatcatcattgtctagtcatagatggtcgacgtttctcaaagtcgaattagaatgtgatatcgacggaagaagttatagacaaattattcattctagaactataaaaacagataatgatacgatactatatgtattcttcgatagtccttattccaagtccgcattatgtacctattctatgaataccattaaacaatctttttctacgtcaaaattggaaggatatacaaagcaattgccgtctccagctcctggtatatgtttaccagctggaaaagttgttccacataccacgtttgaagtcatagaacaatataatgtactagatgatattataaagcctttatctaaccaacctatcttcgaaggaccgtctggtgttaaatggttcgatataaaggagaaggaaaatgaacatcgggaatatagaatatacttcataaaagaaaattctatatattcgttcgatacaaaatctaaacaaactcgtagctcgcaagtcgatgcgcgactattttcagtaatggtaactgcgaaaccgttatttatagcagatatagggataggagtaggaatgccacaaatgaaaaaaatacttaaaatgtaatcttaatcgagtacaccacacgacaatgaacaaacataagacagattatgctggttatgcttgctgcgtaatatgcggtctaattgtcggaattatttttacagcgacactattaaaagttgtagaacgtaaattagttcatacaccattaatagataaaacgataaaagatgcatatattagagaagattgtcctactgactggataagctataataataaatgtatccatttatctactgatcgaaaaacctgggaggaaggacgtaatgcatgcaaagctctaaattcaaattcggatctaattaagatagagactccaaacgagttaagttttttaagaagccttagacgaggctattgggtaggagaatccgaaatattaaaccagacaaccccatataattttatagctaagaatgccacgaagaatggaactaaaaaacggaaatatatttgtagcacaacgaatactcccaaactgcattcgtgttacactatataacaattacactacatttttatcataccactacttcggttagatgttttagaaaaaaataaatatcgccgtaccgttcttgtttttataaaaataacaattaacaattatcaaattttttctttaatattttacgtggttgaccattcttggtggtaaaataatctcttagtgttggaatggaatgctgtttaatgtttccacactcatcgtatattttgacgtatgtagtcacatcgtttacgcaatagtcagactgtagttctatcatgcttcctacatcagaaggaggaacagttttaaagtctcttggttttaatctattaccgttagttttcatgaaatcctttgttttatccacttcacattttaaataaatgtccactatacattcttttgttaattttactagatcgtcatgggtcatagaatttataggttccgtagtccatggatccaaactagcaaacttcgcgtatacggtatcgcgattagtgtatacaccaactgtatgaaaattaagaaaacagtttaataaatcaacagaaatatttaatcctccgtttgatacagatgcgccatatttatggatttcggattcacacgttgtttgtctgaggtgttcgtctagtgttgcttctacgtaaacttcgattcccatatattctttattgtcagaatcgcataccgatttatcatcatacactgtttgaaaactaaatggtatacacatcaaaataataaataataacgagtacattctgcaatattgttatcgtaattggaaaaatagtgttcgagtgagttggattatgtgagtattggattgtatattttattttatattttgtaataagaataaaatgctaatgtcaagtttattccaatagatgtcttattaaaaacatatataataaataacaatggctgaatggcataaaattatcgaggatatctcaaaaaataataagttcgaggatgccgccatcgttgattacaagactacaaagaatgttctagctgctattcctaacagaacatttgccaagattaatccgggtgaaattattcctctcatcactaatcgtaatattctaaaacctcttattggtcagaaatattgtattgtatatactaactctctaatggatgagaacacgtatgctatggagttgcttactgggtacgcccctgtatctccgatcgttatagcgagaactcataccgcacttatatttttgatgggtaagccaacaacatccagacgtgacgtgtatagaacgtgtagagatcacgctacccgtgtacgtgcaactggtaattaaaataaaaagtaatattcatatgtagtgtcaattttaaatgatgatgatgaaatggataatatccatattgacgatgtcaataatgccggtattggcatacagttcatcgatttttagatttcattcagaggatgtggaattatgttatgggcatttgtattttgataggatctataatgtagtaaatataaaatataatccgcatattccatatagatataattttattaatcgcacgttaaccgtagatgaactagacgataatgtcttttttacacatggttattttttaaaacacaaatatggttcacttaatcctagtttgattgtctcattatcaggaaacttaaaatataatgatatacaatgctcagtaaatgtatcgtgtctcattaaaaatttggcaacgagtacatctactatattaacatctaaacataagacttattctctacatcggtccacgtgtattactataataggatacgattctattatatggtataaagatataaatgacaagtataatgacatctatgattttactgcaatatgtatgctaatagcgtctacattgatagtgaccatatacgtgtttaaaaaaataaaaatgaactcttaattatgctatgctattagaaatggataaaatcaaaattacggttgattcaaaaattggtaatgttgttaccatatcgtataacttggaaaagataactattgatgtcacacctaaaaagaaaaaagaaaaggatgtattattagcgcaatcagttgctgtcgaagaggcaaaagatgtcaaggtagaagaaaaaaatattatcgatattgaagatgacgatgatatggatgtagaaagcgcgtaatacgatctataaaaataagtatataaatactttttatttactgtactcttactgtgtagtggtgataccctactcgattatttttttaaaaaaaaaatacttattctgattcttctagccatttccgtgttcgtttgaatgccacatcgacgtcaaagataggggagtagttgaaatctagttctgcattgttggtacgcacctcaaatgtagtgttggatatcttcaacgtatagttgttgagtagtgatggttttctaaatagaattctcttcatatcattcttgcacgcgtacatttttagcatccatcttggaatcctagatccttgttctattcccaatggtttcatcaatagaagattaaacatatcgtacgaacacgatggagagtaatcgtagcaaaagtaagcatttcctttaatcttagatcccggatactggatatattttgcagccaacacgtgcatccatgcagcatttcctacatatacccggctatgcaccgcgtcatcatcgactgtacgatacataatgttaccgtgttgcttacattgctcgtaaaagactttcatcaatttgtctccttctccgtaaattccagtgggtcttaggcaacaagtatacaattttgctccattcatgattacggaattattggctttcataaccagttgctcggccatacgtttactttttgcgtatacatgtcctggtgatatatcataaagggtatgctcatggccgatgaatggatcaccgtgtttattgggtcctattgcttccatgctactagtatagatcaaatacttgattcctaggtccacacaagctgccaaaatagtctgtgttccataatagtttactttcatgatttcattatcggtgtattttccaaatacatccactagagcagccgtatgaataatcagatttaccccatctagcgcttctctcaccttatcaaagtcgtttatatcacattgtatatagtttataaccttaactttcgaggttattggttgtggatcttctacaatatctatgactctgatttcttgaacatcatctgcactaattaacagttttactatatacctgcctagaaatccggcaccaccagtaaccgcgtacacggccattgctgccactcataatatcagactacttattctattttactaaataatggctgtttgtataatagaccacgataatatcagaggagttatttactttgaaccagtccatggaaaagataaagttttaggatcagttattggattaaaatccggaacgtatagtttgataattcatcgttacggagatattagtcaaggatgtgattccataggcagtccagaaatatttatcggtaacatctttgtaaacagatatggtgtagcatatgtttatttagatacagatgtaaatatatttacaattattggaaaggcgttatctatttcaaaaaatgatcagagattagcgtgtggagttattggtatttcttacataaatgaaaagataatacattttcttacaattaacgagaatggcgtttgatatatcagttaatgcgtctaaaacaataaatgcattagtttacttttctactcagcaaaataaattagtcatacgtaatgaagttaatgatacacactacactgtcgaatttgatagggacaaagtagttgacacgtttatttcatataatagacataatgacaccatagagataagaggggtgcttccagaggaaactaatattggttgcgcggttagtatgacttacttgtataataagtatagttttaaactgattttagcagaatatataagacacagaaatactatatccggcaatatttattcggcattgatgacactagatgatttggctattaaacagtatggagacattgatctattatttaatgagaaacttaaagtagactccgattcgggactatttgactttgtcaactttgtaaaggatatgatatgttgtgattctagaatagtagtagctctatctagtctagtatctaaacattgggaattgacaaataaaaaatataggtgtatggcattagccgaacatatatctgatagtattccaatatctgagctatctagactacgatacaatctatgtaagtatctacgcggacacactgagagcatagaggataaatttgattattttgaagacgatgattcgtctacatgttctgccgtaaccgacagggaaacggatgtataattttttttatagcgtgaaggatatgataaaaaatataattgttgtatttatcccattccaatcaccttatatgattctgtaacacaataaaggagtcttatagatgtatagaggtcagatactggtttgataaactgtttattccacataagtatgtttgactttatggttagacccgcatactttaacaaatcactgaaaattggagttaggtattgacctctcagaatcagttgccgttctggaacattaaatgtattttttatgatatactccaacgcatttatgtgggcatacaacaagtcattactaatggaatattccaagagttttagttgtctagtatttaacaagagaagagatttcaacagactgtttatgaactcgaatgccgcctcattgtcgcttatattgatgatgtcgaattctcccaatatcatcaccgatgagtagctcatcttgttatcgggatccaagttttctaaagatgtcattaaaccctcgatcatgaatggatttatcatcatcgtttttatgttggacatgagcttagtccgtttgtccacatctatagaagatgatttctgaattatttcatatatctctctctttaactccaggaacttgtcaggatggtctactttaatatgttctcgtctaagagatgaaaatctttggatggttgcacgcgacttttctctaaaggatgacgttgcccaagatcctctcttaaatgaatccatcttatccttggacaagatggacagtctattttccttagatggtttaatatttttgttacccatgatctataaaggtagacctaatcgtctcggatgaccatatatttattttcagttttattatacgcataaattgtaaaaaatatgttaggtttacgaaaatgtctcgtggggcattaatcgtttttgaaggattggacaaatctggaaaaacaacacaatgtatgaacatcatggaatcaataccttcaaacacaataaaataccttaactttcctcagagatccactgtcactggaaagatgatagatgactatctaactcgtaaaaaaacctataatgatcatatagttaatctattattttgtgcaaatagatgggagtttgcatcttttatacaagaacaactagaacagggaattactttaatagttgatagatacgcattttctggagtagcgtatgccgccgctaaaggcgcgtcaatgactctcagtaagagttatgaatctggattgcctaaacccgacttagttatattcttggaatctggtagcaaagaaattaatagaaacgtcggtgaggaaatttatgaagatgttacattccaacaaaaggtattacaagaatataaaaaaatgattgaagaaggagatattcattggcaaattatttcttctgaattcgaggaagatgtaaagaaggagttgattaagaatatagttatagaggctatacacacggttactggaccagtggggcaactgtggatgtaatagtgaaattacattttttataaatagatgttagtacagtgttataaatggatgaagcatattactctggcaacttggaatcagtactcggatacgtgtccgatatgcataccgaactcgcatcaatatctcaattagttattgccaagatagaaactatagataatgatatattaaacaaggacattgtaaattttatcatgtgtagatcaaacttggataatccatttatctctttcctagatactgtatatactattatagatcaagagaactatcagactgagttgattaattcattagacgacaatgaaattatcgattgtatagttaataagtttatgagcttttataaggataacctagaaaatatagtagatgctatcattactctaaaatatataatgaataatccagattttaaaactacgtatgccgaagtactcggttccagaatagccgatatagatattaaacaagtgatacgtaagaatatactacaattgtctaataatatccgcgaacgatatttgtgaaaatattaaaaaaaaatactttttttattaaatgacgtcttttcgtgaatttagaaaattatgctgtgctatatatcacgcatcaggatataaagaaaaatctaaattaattagagactttataacagatagggatgataaatatttgatcattaagctattgcttcccggattagacgatagaatttataacatgaacgataaacaaattataaaattatatagtataatatttaaacaatctcaggaagatatgctacaagatttaggatacggatatataggagacactattaggactttcttcaaagagaacacagaaatccgtccacgagataaaagcattttaactttagaagaagtggatagttttttaactacgttatcatccgtaactaaagaatcgcatcaaataaaattattgactgatgtagcatctgtttgtacatgtaatgatttaaaatgtgtagtcatgcttattgataaagatctaaaaattaaagcgggtcctcggtacgtacttaacgctattagtcctaatgcctatgatgtgtttagaaaatctaataacttgaaagagataatagaaaattcatctaaacaaaatctagactctatatctatttctgttatgactccaattaatcccatgttagcggaatcgtgtgattctgtcaataaggcgtttaaaaaatttccatcaggaatgtttgcggaagtcaaatacgatggtgaaagagtacaagttcataaaaataataacgagtttgccttctttagtagaaacatgaaaccagtactctctcataaagtggattatctcaaagaatacataccgaaagcatttaaaaaagctacgtctatcgtattggattctgaaattgttcttgtagacgaacataatgtaccgctcccgtttggaagtttaggtatacacaaaaagaaagaatataaaaactctaacatgtgtttgttcgtgtttgactgtttgtactttgatggattcgatatgacggacattccattgtacgaacgaagatcttttctcaaagatgttatggttgaaatacccaatagaatagtattctcagagttgacgaatattagtaacgagtctcagttaactgacgtattggatgatgcactaacgagaaaattagaaggattggtcttaaaagatattaatggagtatacgaaccgggaaagagaagatggttaaaaataaagcgagactatttgaacgagggttccatggcagattctgccgatttagtagtactaggtgcctactatggtaaaggagcaaagggtggtatcatggcagtctttctaatgggttgttacgacgatgaatccggtaaatggaagacggttaccaagtgttcaggacacgatgataatacgttaagggagttgcaagaccaattaaagatgattaaaattaacaaggatcccaaaaaaattccagagtggttagtagttaataaaatctatattcccgattttgtagtagaggatccgaaacaatctcagatatgggaaatttcaggagcagagtttacatcttccaagtcccataccgcaaatggaatatccattagatttcctagatttactaggataagagaggataaaacgtggaaagaatctactcatctaaacgatttagtaaacttgactaaatcttaatagttacatacaaactgaaaattaaaataacactatttagttggtggtcgccatggatggtgttattgtatactgtctaaacgcgctagtaaaacatggcgaggaaataaatcatataaaaaatgatttcatgattaaaccatgttgtgaaagagtttgtgaaaaagtcaagaacgttcacattggcggacaatctaaaaacaatacagtgattgcagatttgccatatatggataatgcggtatccgatgtatgcaattcactgtataaaaagaatgtatcaagaatatccagatttgctaatttgataaagatagatgacgatgacaagactcctactggtgtatataattattttaaacctaaagatgccattcctgttatcatatctataggaaaggataaagatgtctgtgaactattaatctcatcagacatatcgtgtgcatgcgtggagttaaattcatatcacgtagccattcttcccatggatgtttccttttttaccaaaggaaatgcatcattgattattctcctgtttgatttctctatcgatgcggcacctctcttaagaagtgtaaccgataataatgttattatatctagacaccagcgtctacatgacgagcttccgagttccaattggttcaagttttacataagtataaagtccgactattgttctatattatatatggttgttgatggatctgtgatgcatgcgatagctgataatagaactcacgcaattattagcaaaaatatattagacaatactacgattaacgatgagtgtagatgctgttattttgaaccacagattaggattcttgatagagatgagatgctcaatggatcatcgtgtgatatgaacagacattgtattatgatgaatttacctgatgtaggcgaatttggatctagtatgttggggaaatatgaacctgacatgattaagattgctctttcggtggctggtaatttaataagaaatcgagactacattcccgggagacgaggatatagctactacgtttacggtatagcctctagataatttttttaagcacgaaataaaaaacataattttaaaccaatctatttcatactattttgtgtgatcaccatggacataaagatagatattagtatttctggtgataaatttacggtgactactaggagggaaaatgaagaaagaaaaaaatatctacctctccaaaaagaaaaaactactgatgttatcaaacctgattatcttgagtacgatgacttgttagatagagatgagatgtttactattctagaggaatattttatgtacagaggtctattaggcctcagaataaaatatggacgactctttaacgaaattaaaaaattcgacaatgatgcggaagaacaattcggtactatagaagaactcaagcagaaacttagattaaattctgaagagggagcagataactttatagattatataaaggtacaaaaacaggatatcgtcaaacttactgtatacgattgcatatctatgataggattgtgtgcatgcgtggtagatgtttggagaaatgagaaactgttttctagatggaaatattgtttacgagcgattaaactgtttattgatgatcacatgcttgataagataaaatctatactgcagaatagactagtatatgtggaaatgtcatagaaagttaaaagttaatgagagcaaaaatatataaggttgtattccatatttgttatttttttctgtaatagttagaaaaatacattcgatggtctatctatcagattattatgtgttataaggtactttttctcataataaactagagtatgagtaagatagtgtttttcaaaacatataaatctaaaattgatggatgagatatacagctattaatttcgaaaatatattttaatctgataactttaaacatggatttttaatggtggtttaacgttttaaaaaaagattttgttattgtagtatatgataatattaaaagatggatataaagaatttgctgactgcatgtactattttttacattactacattggctacggcagatatacctacttcgtcactgccacacgctccggtaaacggggcatgtgacgagggagaatatcttgataagaggcataatcaatgttgtaatcagtgtccacctggagaatttgccaaggttagatgtaatggtaacgataacacaaaatgtgaacgctgcccacctcatacatataccgcaatccccaattactctaatggatgtcatcaatgtagaaaatgcccaacaggatcatttgataaggtaaagtgtaccggaacacagaacagtaaatgttcgtgtcttcctggttggtattgcgctactgattcttcacagactgaagattgtcgagattgtataccaaaaaggagatgtccatgcggatactttggtggaatagatgaacaaggaaatcctatttgtaaatcgtgttgtgttggtgaatattgcgactacctacgtaattatagacttgatccatttcctccatgcaaactatctaaatgtaattaattatgattttgatgataatgttaccatacattatatcgctacttggttagtgtattattcagtatgaagacctattaataattacttatcttttgacgatcttgttataattataatataaaaatacttatggcatagtaactcataattgctgacgcgataaattcgtaataatctgttttgttcaaatttttataaggaatctacaggcataaaaataaaaatataatttataatatactcttacagcgcgccatcatgaataacagcagtgaattgattgctgttattaatggatttagaaatagtggacgattttgtgatattaatatagttattaatgatgaaaggataaacgctcacagactcatcctatctggagcctccgaatatttttccattctgttttccaataattttatcgattctaatgaatacgaagttaatctaagtcatttagattatcaaagtgttaacgatttgatcgattacatttatgggatacctttgagcctaactaacgataacgtgaaatatattctttcaaccgctgattttttacaaattggatctgctattacggagtgtgaaaattacatacttaaaaatctttgttctagaaactgtatcgatttctacatatacgctgataaatataataacaagaaaatagaatcagcgtcgtttaacacaatattacaaaatattttgagactcatcaacgatgaaaactttaaatacttaacagaggaatcaatgataaaaattttaagcgatgatatgttaaatataaaaaatgaggatttcgccccactaattctcattaaatggttagagagtactcaacaaccatgcaccgtcgagttacttaaatgcctcagaatatcattgctttccccacaagttataaaatcactttatagtcatcgactggttagttcaatctacgaatgtataacattcttaaacaatatagcattcttggatgaatcatttcctagataccatagcatcgagttgatatctatcggtataagtaattcgcatgataagatttccataaactgctacaatcataaaaaaaatacatgggaaatgatatcttcacgtagatataggtgtagtttcgcagtggccgtcctggataatattatctatatgatgggtggatatgatcagtccccgtatagaagttcaaaggttatagcgtacaatacatgtacaaattcttggatatatgatataccagagctaaaatatcctcgttctaattgtgggggactggctgatgacgaatacatttattgtataggcggcatacgcgatcaggattcatcgttgacatctagtattgatagatggaagccatcaaaaccatattggcagaagtatgctaaaatgcgcgaaccaaaatgtgatatgggggttgcgatgttaaacggattaatatatgttataggtggaatcgttaaaggtgacacgtgtaccgacgcactagagagtttatcagaagatggatggatgaagcatcaacgtcttccaataaaaatgtccaatatgtcgacgattgttcatgatggcaagatttatatatctggaggttacaacaatagtagtgtagttaatgtaatatcgaatctagtccttagctataattcgatatatgatgaatggaccaaattatcatcattaaacattcctagaattaatcccgctctatggtcagcgcataataaattatatgtaggaggaggaatatctgatgatgttcgaactaatacatctgagacatacgacaaagaaaaagattgttggacattggataatggtcacgtgttaccacgcaattatataatgtataaatgcgaaccgattaaacataaatatccattggaaaaaacacagtacacgaatgattttctaaagtatttggaaagttttataggtagttgatagaacaaaatacataattttgtaaaaataaatcactttttatactaatatgacacgattaccaatacttttgttactaatatcattagtatacgctacaccttttcctcagacatctaaaaaaataggtgatgatgcaactctatcatgtaatcgaaataatacaaatgactacgttgttatgagtgcttggtataaggagcccaattccattattcttttagctgctaaaagcgacgtcttgtattttgataattataccaaggataaaatatcttacgactctccatacgatgatctagttacaactatcacaattaaatcattgactgctagagatgccggtacttatgtatgtgcattctttatgacatcaactacaaatgacactgataaagtagattatgaagaatactccacagagttgattgtaaatacagatagtgaatcgactatagacataatactatctggatctacacattcaccggaaactagttctgagaaacctgattatatagataattctaattgctcgtcggtattcgaaatctaagcttaaaaattgaaattttattttttttttttggaatataaataagctcgaagtcgaccaccatggtgggtgaggatagcgtgctgatcaccgagaacatgcacatgaaactgtacatggagggcaccgtgaacgaccaccacttcaagtgcacatccgagggcgaaggcaagccctacgagggcacccagaccatgaagatcaaggtggtcgagggcggccctctccccttcgccttcgacatcctggctaccagcttcatgtacggcagcaaaacctttatcaaccacacccagggcatccccgacttctttaagcagtccttccctgagggcttcacatgggagaggatcaccacatacgaagacgggggcgtgctgaccgctacccaggacaccagcctccagaacggctgcctcatctacaacgtcaagatcaacggggtgaacttcccatccaacggccctgtgatgcagaagaaaacactcggctgggaggccagcaccgagatgctgtaccccgctgacagcggcctgagaggccatagccagatggccctgaagctcgtgggcgggggctacctgcactgctccctcaagaccacatacagatccaagaaacccgctaagaacctcaagatgcccggcttctacttcgtggacaggagactggaaagaatcaaggaggccgacaaagagacctacgtcgagcagcacgagatggctgtggccaggtactgcgacctgcctagcaaactggggcacagctgattaattaatttttatcgatctaattcaacaatgtctggagagctcggtaccaagcttcgcaggatcccgactccggaaccaattactgataaagaagatcatacagttacagacactgtctcatacactacagtaagtacatcatctggaattgtcactactaaatcaaccaccgatgatgcggatctttatgatacgtacaatgataatgatacagtaccaccaactactgtaggcggtagtacaacctctattagcaattataaaaccaaggactttgtagaaatatttggtattaccgcattaattatattgtcggccgtggcaattttctgtattacatattatatatataataaacgttcacgtaaatacaaaacagagaacaaagtctagatttttgacttacataaatgtctgggatagtaaaatctatcatattgagcggaccatctggtttaggaaagacagccatagccaaaagactatgggaatatatttggatttgtggtgtcccataccactagatttcctcgtcctatggaacgagaaggtgttgattaccattacgttaacagagaggccatctggaagggaatagccgccggaaactttctagaacatactgagtttttaggaaatatttacggaacttctaaaacagctgtgaatacagcggctattaataatcgtatttgtgtgatggatctaaacatcgacggtgttagaagtcttaaaaatacgtacctaatgccttactcggtgtatataagacctacctctcttaaaatggttgagaccaagcttcgtcgtagaaacactgaagctaacgatgagattcatcgtcgtgtgatgttggcaaaaactgacatggatgaggcaggtgaagccggtctattcgacactattatcattgaagatgatgtgaatttagcatatagtaagttaattcagatactacaggaccgtattagaatgtattttaacactaattagagacttaagacttaaaacttgataattaataatataactcgtttttatatgtgtctatttcaacgtctaatgtattagttaaatattaaaacttaccacgtaaaacttaaaatttaaaatgatatttcattgacagatagatcacacattatgaactttcaaggacttgtgttaactgacaattgcaaaaatcaatgggtcgttggaccattaataggaaaaggtggattcggtagtatttatactactaatgacaataattatgtagtaaaaatagagcccaaagctaacggatcattatttaccgaacaggcattttatactagagtacttaaaccatccgttatcgaagaatggaaaaaatctcacaatataaagcacgtaggtcttatcacgtgcaaggcatttggtctatacaaatccattaatgtggaatatcgattcttggtaattaatagattaggtgcagatctagatgcggtgatcagagccaataataatagactaccaaaaaggtcggtgatgttgatcggaatcgaaatcttaaataccatacaatttatgcacgagcaaggatattctcacggagatattaaagcgagtaatatagtcttagatcaaatagataagaataaattatatctagtggattacggattggtttctaaattcatgtctaatggcgaacatgttccatttataagaaatccaaataaaatggataacggtactctagaatttacacctatagattcgcataaaggatacgttgtatctagacgtggagatctagaaacacttggatattgtatgattagatggttgggaggtatcttaccatggactaagatatctgaaacaaagaattgtgcattagtaagtgccacaaaacagaaatatgttaacaatactgcgactttgttaatgaccagtttgcaatatgcacctagagaattgctgcaatatattaccatggtaaactctttgacatattttgaggaacccaattacgacaagtttcggcacatattaatgcagggtgtatattattaagtgtggtgtttggtcgataaaaattaaaaaataacttaatttattattgatctcgtgtgtacaaccgaaatcatggcgatgttttacgcacacgctctcggtgggtacgacgagaatcttcatgcctttcctggaatatcatcgactgttgccaatgatgtcaggaaatattctgttgtgtcagtttataataacaagtatgacattgtaaaagacaaatatatgtggtgttacagtcaggtgaacaagagatatattggagcactgctgcctatgtttgagtgcaatgaatatctacaaattggaaatccgatccatgatcaagaaggaaatcaaatctctatcatcacatatcgccacaaaaactactatgctctaagcggaatcgggtacgagagtctagacttgtgtttggaaggagtagggattcatcatcacgtacttgaaacaggaaacgctgtatatggaaaagttcaacatgattattctactatcaaagagaaggccaaagaaatgagtgcacttagtccaggacctatcatcgattaccacgtctggataggagattgtatctgtcaagttactgctgtggacgtacatggaaaggaaattatgaaaatgagattcaaaaagggtgcggtgcttccgatcccaaatctggtaaaagttaaacttggggagaatgatacagaaaatctttcttctactatatcggcggcaccatcgaggtaaccacctctctggaagacagcgtgaatcatgtactcatgaaacgtttggaaactatacgccatatgtggtctgttgtatatgatcattttgatattgtgaatggtaaagaatgctgttatgtgcatacgcattcatctaatcaaaatcctataccgagtactgtaaaaacaaatttgtacatgaagactatgggatcatgcattcaaatggattccatggaagctctagagtatcttagcgaactgaaggaatcaggtggatggagtcccagaccagaaatgcaggaatttgaatatccagatggagtggaagacactgaatcaattgagagattggcagaggagttcttcaatagatcagaacttcaggctggtgaatcagtcaaatttggtaattctattaattgttaaacatacatctgtttcagctaagcaactaagaacacgtatacggcagcagcttccttctatactctcatcttttaccaacacaaagggtggatatttgttcattggagttgataataatacacacaaagtatttggattcacggtgggttacgactacctcagactgatagagaatgatatagaaaagcatatcaaaagacttcgtgttgtgcatttctgtgagaagaaagaggacatcaagtacgcgtgtcgattcatcaaggtatataaacctggggatgagactacctcgacatacgtgtgcgctatcaaagtggaaagatgctgttgtgctgtgtttgcagattggccagaatcatggtatatggatactaatggtatcaagaagtattctccagatgaatgggtgtcacatataaaattttaattaatgtaactatagagaacaaataataaggttgtaatatcatatagacaataactaacaattaattagtaactgttatctcttttttaactaaccaactaactatatacctattaatacatcgtaattatagttcttaacatctattaatcattaattcgcttctttaattttttataaactaacattgttaattgaaaagggataacatgttacagaatataaattatatatggatttttttaaaaaggaaatacttgactggagtatatatttatctcttcattatatagcacgcgtgttttccaatttttccacatcccatataatacaggattataatctcgttcgaacatacgagaaagtggataaaacaatagttgattttttatctaggttgccaaatttattccatattttagaatatggggaaaatattctacatatttattctatggatgatgctaatacgaatattataattttttttctagatagagtattaaatattaataagaacgggtcatttatacacaatctcgggttatcatcatccattaatataaaagaatatgtatatcaattagttaataatgatcatccagataataggataagactaatgcttgaaaatggacgtagaacaagacattttttgtcctatatatcagatacagttaatatctatatatgtattttaataaatcatggattttatatagatgccgaagacagttacggttgtacattattacatagatgtatatatcactataagaaatcagaatcagaatcatacaatgaattaattaagatattgttaaataatggatcagatgtagataaaaaagatacgtacggaaacacaccttttatcctattatgtaaacacgatatcaacaacgtggaattgtttgagatatgtttagagaatgctaatatagactctgtagactttaatagatatacacctcttcattatgtctcatgtcgtaataaatatgattttgtaaagttattaatttctaaaggagcaaatgttaatgcgcgtaataaattcggaactactccattttattgtggaattatacacggtatctcgcttataaaactatatttggaatcagacacagagttagaaatagataatgaacatatagttcgtcatttaataatttttgatgctgttgaatctttagattatctattatccagaggagttattgatattaactatcgtactatatacaacgaaacatctatttacgacgctgtcagttataatgcgtataatacgttggtctatctattaaacaaaaatggtgattttgagacgattactactagtggatgtacatgtatttcggaagcagtcgcaaacaacaacaaaataataatggaagtactattgtctaaacgaccatctttgaaaattatgatacagtctatgatagcaattactaaacataaacagcataatgcagatttattgaaaatgtgtataaaatatactgcgtgtatgaccgattatgatactcttatagatgtacagtcgctacagcaatataaatggtatattttaagatgtttcgatgaaatagatatcatgaagagatgttatataaaaaataaaactgtattccaattagttttttgtatcaaagacattaatactttaatgagatacggtaaacatccttctttcgtgaaatgcactagtctcgacgtatacggaagtcgtgtacgtaatatcatagcatctattagatatcgtcagagattaattagtctattatccaagaagctggatcctggagataaatggtcgtgttttcctaacgaaataaaatataaaatattggaaaactttaacgataacgaactatccacatatctaaaaatcttataaacattattaaaatataaaatctaagtaggataaaatcacactacatcattgtttccttttagtgctcgacagtgtatactatttttaacgctcataaataaaaatgaaaacgatttccgttgttacgttgttatgcgtactacctgctgttgtttattcaacatgtactgtacccactatgaataacgctaaattaacgtctaccgaaacatcgtttaatgataaccagaaagttacgtttacatgtgatcagggatatcattctttggatccaaatgctgtctgtgaaacagataaatggaaatacgaaaatccatgcaaaaaaatgtgcacagtttctgattatgtctctgaactatataataaaccgctatacgaagtgaattccaccatgacactaagttgcaacggcgaaacaaaatattttcgttgcgaagaaaaaaatggaaatacttcttggaatgatactgttacgtgtcctaatgcggaatgtcaacctcttcaattagaacacggatcgtgtcaaccagttaaagaaaaatactcatttggggaatatatgactatcaactgtgatgttggatatgaggttattggtgcttcgtacataagttgtacagctaattcttggaatgttattccatcatgtcaacaaaaatgtgatatgccgtctctatctaacggattaatttccggatctacattttctatcggtggcgttatacatcttagttgtaaaagtggttttacactaacggggtctccatcatccacatgtatcgacggtaaatggaatcccatactcccaatatgtgtacgaactaacgaaaaatttgatccagtggatgatggtcccgacgatgagacagatttgagcaaactctcgaaagacgttgtacaatatgaacaagaaatagaatcgttagaagcaacttatcatataatcatagtggcgttgacaattatgggcgtcatatttttaatctccgttatagtattagtttgttcctgtgacaaaaataatgaccaatataagttccataaattgctaccgtaaatataaatccgttaaaataattaataatttaataacaaacaagtatcaaaagattaaagacttatagctagaatcaattgagatgtcttcttcagtggatgttgatatctacgatgccgttagagcatttttactcaggcactattataacaagagatttattgtgtatggaagaagtaacgccatattacataatatatacaggctatttacaagatgcgccgttataccgttcgatgatatagtacgtactatgccaaatgaatcacgtgttaaacaatgggtgatggatacacttaatggtataatgatgaatgaacgcgatgtttctgtaagcgttggcaccggaatactattcatggaaatgtttttcgattacaataaaaatagtatcaacaatcaactaatgtatgatataattaatagcgtatctataattctagctaatgagagatatagaagcgcttttaacgacgatggtatatacatccgtagaaatatgattaacaagttgtacggatacgcatctctaactactattggcacgatcgctggaggtgtttgttattatctgttgatgcatctagttagtttgtataaataattatttcaatatactagttaaaattttaagattttaaatgtataaaaaactaataacgtttttatttgtaataggtgcattagcatcctattcgaataatgagtacactccgtttaataaactgagtgtaaaactctatatagatggagtagataatatagaaaattcatatactgatgataataatgaattggtgttaaattttaaagagtacacaatttctattattacagagtcatgcgacgtcggatttgattccatagatatagatgttataaacgactataaaattattgatatgtataccattgactcgtctactattcaacgcagaggtcacacgtgtagaatatctaccaaattatcatgccattatgataagtacccttatattcacaaatatgatggtgatgagcgacaatattctattactgcagagggaaaatgctataaaggaataaaatatgaaataagtatgatcaacgatgatactctattgagaaaacatactcttaaaattggatctacttatatatttgatcgtcatggacatagtaatacatattattcaaaatatgatttttaaaaatttaaaatatattatcacttcagtgacagtagtcaaataacaaacaacaccatgagatatattataattctcgcagttttgttcattaatagtatacatgctaaaataactagttataagtttgaatccgtcaattttgattccaaaattgaatggactggggatggtctatacaatatatcccttaaaaattatggcatcaagacgtggcaaacaatgtatacaaatgtaccagaaggaacatacgacatatccgcatttccaaagaatgatttcgtatctttctgggttaaatttgaacaaggcgattataaagtggaagagtattgtacgggactatgcgtcgaagtaaaaattggaccaccgactgtaacattgactgaatacgacgaccatatcaatttgtacatcgagcatccgtatgctactagaggtagcaaaaagattcctatttacaaacgcggtgacatgtgtgatatctacttgttgtatacggctaacttcacattcggagattctaaagaaccagtaccatatgatatcgatgactacgattgcacgtctacaggttgcagcatagactttgtcacaacagaaaaagtgtgcgtgacagcacagggagccacagaagggtttctcgaaaaaattactccatggagttcgaaagtatgtctgacacctaaaaagagtgtatatacatgcgcaattagatccaaagaagatgttcccaatttcaaggacaaaatggccagagttatcaagagaaaatttaatacacagtctcaatcttatttaactaaatttctcggtagcacatcaaatgatgttaccacttttcttagcatgcttaacttgactaaatattcataactaatttttattaatgatacaaaaacgaaataaaactgcatattatacactggttaacgcccttataggctctaaccattttcaagatgaggtccctgattatagtccttctgttcccctctatcatctactccatgtctattagacgatgtgagaagactgaagaggaaacatggggattgaaaatagggttgtgtataattgccaaagatttctatcccgaaagaactgattgcagtgttcatctcccaactgcaagtgaaggattgataactgaaggcaatggattcagggatatacgaaacaccgataaattataaaaaaagcaatgtgtccgctgtttccgttaataatactattttcgtaactggcggattattcataaataactctaatagcacgatcgtggttaacaatatggaaaaacttgacatttataaagacaaacaatggtcgattatagaaatgcctatggctagggtatatcacggcattgactcgacatttggaatgttatattttgccggaggtctatccgttaccgaacaatatggtaatttagagaaaaacaacgagatatcttgttacaatcctagaacgaataagtggtttgatatttcatatactatttataagatatccatatcatcattgtgtaaactaaataacgtcttctatgtatttagtaaggacattggatatgtggaaaagtatgatggtgcatggaagttagtacatgatcgtctccccgctataaaggcattatcaacttctccttattgattgaaaatgaaaatataaatagtttttatgtatagcagtattaccctatagttttattgcttactactaacatggatacagatgttacaaatgtagaagatatcataaatgaaatagatagagagaaagaagaaatactaaaaaatgtagaaattgaaaataataaaaacattaacaagaatcatcccaatgaatatattagagaagcactcgttattaataccagtagtaatagtgattccattgataaagaagttatagaatgtatcagtcacgatgtaggaatatagatcatatctactaatttttataatcgatacaaaacataaaaaacaactcgttattacatagcaggcatggaatccttcaagtattgttttgataacgatggcaagaaatggattatcggaaatactttatattctggtaattcaatactctataaggtcagaaaaaatttcactagttcgttctacaattacgtaatgaagatagatcacaaatcacacaagccattgttgtctgaaatacgattctatatatctgtattggatcctttgactatcgacaactggacacgggaacgtggtataaagtatttggctattccagatctgtatggaattggagaaaccgatgattatatgttcttcgttataaagaattcgggaagagtattcgccccaaaggatactgaatcagtcttcgaagcatgcgtcactatgataaacacgttagagtttatacactctcgaggatttacccatggaaaaatagaaccgaggaatatactgattagaaataaacgtctttcactaattgactattctagaactaacaaactatacaagagtggaaactcacatatagattacaacgaggacatgataacttcaggaaatatcaattatatgtgtgtagacaatcatcttggagcaacagtttcaagacgaggagatttagaaatgttgggatattgcatgatagaatggttcggtggcaaacttccatggaaaaacgaaagtagtataaaagtaataaaacaaaaaaaagaatataaaaaatttatagctactttctttgaggactgttttcctgaaggaaatgaacctctggaattagttagatatatagaattagtatacacgttagattattctcaaactcctaattatgacagactacgtaaactgtttatacaagattgaaattatattcttttttttatagagtgtggtagtgttacggatatctaatattaatattagactatctctatcgcgctacacgaccaatatcgattactatggatatcttctatgaaaggagagaatgtatttatttctccagcgtcaatctcgtcagtattgacaatactgtattatggagctaatggatccactgctgaacagctatcaaaatatgtagaaacggaggagaacacggataaggttagcgctcagaatatctcattcaaatccatgaataaagtatatgggcgatattctgccgtgtttaaagattcctttttgagaaaaattggcgataagtttcaaactgttgacttcactgattgtcgcactatagatgcaatcaacaagtgtgtagatatctttactgaggggaaaatcaatccactattggatgaaccattgtctcctagcaattagtgccgtatactttaaagcaaaatggttgacgccattcgaaaaggaatttaccagtgattatcccttttacgtatctccgacggaaatggtagacgtaagtatgatgtctatgtacggcaaggcatttaatcacgcatctgtaaaagaatcattcggcaacttttcaatcatagaactgccatatgttggagatactagtatgatggtcattcttccagacaagattgatggattagaatccatagaacaaaatctaacagatacaaattttaagaaatggtgtgactttatggatgctatgtttatagatgttcacattcccaagtttaaggtaacaggctcgtataatctggtggatactctagtaaagtcaggactgacagaggtgttcggttcaactggagattatagcaatatgtgtaatttagatgtgagtgtcgacgctatgatccacaaaacgtatatagatgtcaatgaagagtatacagaagcagctgcagcaacttctgtactagtggcagactgtgcatcaacaattacaaatgagttctgtgcagatcatccgttcatctatgtgattaggcatgttgatggaaaaattcttttcgttggtagatattgctctccgacaactaattgttaaccattttttttaaaaaaaatagaaaaaacatgtggtattagtgcaggtcgttgttcttccaattgcaattggtaagatgacggccaactttagtacccacgtcttttcaccacagcactgtggatgtgacagactgaccagtattgatgacgtcaaacaatgtttgactgaatatatttattggtcgtcctatgcataccgcaacaggcaatgcgctggacaattgtattccacactcctctcttttagagatgatgcggaattagtgttcatcgacattcgcgagctggtaaaaaatatgccgtgggatgatgtcaaagattgtacagaaatcatccgttgttatataccggatgagcaaaaaaccatcagagagatttcggccatcatcggactttgtgcatatgctgctacttactggggaggtgaagaccatcccactagtaacagtctgaacgcattgtttgtgatgcttgagatgctaaattacgtggattataacatcatattccggcgtatgaattgatgagttgtacatcttgacattttctttcttctcttctccctttcttctcttctcccttcctccctcttctccctttcccagaaacaaacttttttacccactataaaataaaatgagtatactacctattatatttcttcctatatttttttattcttcattcgttcagacttttaacgcgtctgaatgtatcgacaaagggcaatattttgcatcattcatggagttagaaaacgagccagtaatcttaccatgtcctcaaataaatacgctatcatccggatataatatattagatattttatgggaaaaacgaggagcggataatgatagaattataccgatagataatggtagcaatatgctaattctgaacccgacacaatcagactctggtatttatatatgcattaccacgaacgaaacctactgtgacatgatgtcgttaaatttgacaatcgtgtctgtctcagaatcaaatatagatcttatctcgtatccacaaatagtaaatgagagatctactggcgaaatggtatgtcccaatattaatgcatttattgctagtaacgtaaacgcagatattatatggagcggacatcgacgccttagaaataagagacttaaacaacggacacctggaattattaccatagaagatgttagaaaaaatgatgctggttattatacatgtgttttagaatatatatacggtggcaaaacatataacgtaaccagaattgtaaaattagaggtacgggatagaataataccttctactatgcaattaccagatggcattgtaacttcaataggtagtaatttgactattgcatgcagagtatcgttgagacctcccacaacggacaccgacgtcttttggataagtaatggtatgtattacgaagaagatgatggggacggaaacggtagaataagtgtagcaaataaaatctatatgaccgataagagacgtgttattacatcccggttaaacattaatcctgtcaaggaagaagatgctacaacgtttacgtgtatggcgtttactattcctagcatcagcaaaacagttactgttagtataacgtgaatgtatgttgttacatttccatgtcaattgagtttataagaatttttatacattatcttccaacaaacaattgacgaacgtattgctatgattaactcccacgatactatgcatattattaatcattaacttgcagactatacctagtgctattttgacatactcgtgttcttgtgtaattgcggtatctatattattaaagtacgtaaatctagctatagttttattatttaattttagataatataccgtctccttatttttaaaaattgccacatcctttattaaatcatgaatgggaatttctatgtcatcgttagtatattgtgaacaacaagagcagatatctataggaaagggtggaatgcgatacattgatctatgtagttttaaaacacacgcgaactttgaagaatttatataaatcattccatcgatacatccttctatgttgacatgtatatatccaggaattcttttattaatgtcaggaaatgtataaactaaaacattgcccgaaagcggtgcctctatctgcgttatatccgttcttaacttacaaaatgtaaccaatacctttgcatgacttgttttgttcggcaacgttagtttaaacttgacgaatggattaattacaatagcatgatccgcgcatctattaagtttttttactttaacgcccttgtatgtttttacagagactttatctaaatttctagtgcttgtatgtgttataaatataacgggatatagaaccgaatcacctaccttagatacccaattacattttatcagatccagataataaacaaattttgtcgccctaactaattctatattgttatatattttacaattggttatgatatcatgtaataacttggagtctaacgcgcatcgtcgtacgtttatacaattgtgatttagtgtagtatatctacacatgtatttttccgcactatagtattctggactagtgataaaactatcgttatatctgtcttcaatgaactcatcgagatattgctctctgtcatattcatacacctgcataaactttctagacatcttacaatccgtgttattttaggatcatatttacatatttacgggtatatcaaagatgttagattagttaatgggaatcgtctataataatgaatattaaacaattatatgaggacttttaccacaaagcatcataaaaatgagtcgtcgtctgatttatgttttaaatatcaaccgcaaatcaactcataaaatacaagagaatgaaatatatacatattttagtcattgcaatatagaccatacttctacagaacttgattttgtagttaaaaactatgatctaaacagacgacaacctgtaactgggtatactgcactacactgctatttgtataataattactttacaaacgatgtactgaagatattattaaatcatgacgtaaatgtaacgatgaaaaccagtagcggacgtatgcctgtttatatattgcttactagatgttgtaatatttcacatgatgtagtgatagatatgatagacaaagataaaaaccacttattacatagagactattccaacctattactagagtatataaaatctcgttacatgttattgaaggaagaggatatcgatgagaacatagtatccactttattagataagggaatcgatcctaactttaaacaagacggatatacagcgttacattattattatttgtgtctcgcacacgtttataaactaggtgagtgtagaaaaccgataacgataaaaaaggccaagcgaattatttctttgtttatacaacatggagctaatctaaacgcgttagataattgtggtaatacaccattccatttgtatcttagtattgaaatgtgtaataatattcatatgactaaaatgctgttgacttttaatccgaatttcaaaatatgtaataatcatggattaacgcctatactatgttatataacttccgactacatacaacacgatattcttgttatgttaatacatcactatgaaacaaatgttggagaaatgccgatagatgagcgtcgtatgatcgtattcgagtttatcaaaacatattctacacgtccggcagattcgataacttatttgatgaataggtttaaaaatataaatatttatacccgctatgaaggaaagacattattacacgtagcatgtgaatataataatacacaagtaatagattatcttatacgtatcaacggagatataaatgcgttaaccgacaataacaaacacgctacacaactcattatagataacaaagaaaattccccatataccattaattgtttactgtatatacttagatatattgtagataagaatgtgataagatcgttggtggatcaacttccatctctacctatcttcgatataaaatcatttgagaaattcatatcctactgtatacttttagatgacacattttacgataggcacgttaagaatcgcgattctaaaacgtatcgatacgcattttcaaaatacatgtcgtttgataaatacgatggtataataactaaatgtcacgacgaaacaatgttactcaaactgtccactgttctagacactacactatatgcagttttaagatgtcataattcgagaaagttaagaagatacctcaacgagttaaaaaaatataataacgataagtcctttaaaatatattctaatattatgaatgagagataccttaatgtatattataaagatatgtacgtgtcaaaggtatatgataaactatttcctgttttcacagataaaaattgtctactaacattactaccttcagaaattatatacgaaatattatacatgctgacaattaacgatctttataatatatcgtatccacctaccaaagtatagttgtatttttctcatgcgatgtgtgtaaaaaaactgatattatataaatattttagtgccgtataataaagatgacgatgaaaatgatggtacatatatatttcgtatcattattgttattgctattccacagttacgccatagacatcgaaaatgaaatcacagaattcttcaataaaatgagagatactctaccagctaaagactctaaatggttgaatccagcatgtatgttcggaggcacaatgaatgatatagccgctctaggagagccattcagcgcaaagtgtcctcctattgaagacagtcttttatcgcacagatataaagactatgtggttaaatgggagaggctagaaaagaatagacggcgacaggtttctaataaacgtgttaaacatggtgatttatggatagccaactatacatctaaattcagtaaccgtaggtatttgtgcaccgtaactacaaagaatggtgactgtgttcagggtatagttagatctcatattaaaaaacctccttcatgcattccaaaaacatatgaactaggtactcatgataagtatggcatagacttatactgtggaattctttacgcaaaacattataataatataacttggtataaagataataaggaaattaatatcgacgacattaagtattcacaaacgggaaaggaattaattattcataatccagagttagaagatagcggaagatacgactgttacgttcattacgacgacgttagaatcaagaatgatatcgtagtatcaagatgtaaaatacttacggttataccgtcacaagaccacaggtttaaactaatactagatccgaaaatcaacgtaacgataggagaacctgccaatataacatgcactgctgtgtcaacgtcattattgatcgacgatgtactgattgaatgggaaaatccatccggatggcttataggattcgattttgatgtatactctgttttaactagtagaggcggtatcaccgaggcgaccttgtactttgaaaatgttactgaagaatatataggtaatacatataaatgtcgtggacacaactattattttgaaaaaacccttacaactacagtagtattggagtaaatatacaatgcatttttatatacattactgaattattattactgaattattattactgaattattattaattatatcgtatttgtgctatagaatggatgaagatacgcgactatctaggtatttgtatctcaccgatagagaacatataaatgtagactctattaaacagttgtgtaaaatatcagatcctaatgcatgttatagatgtggatgtacggctttacatgagtacttttataattatagatcagtcaacggaaaatacaagtatagatacaacggttactatcaatattattcatctagcgattatgaaaattataatgaatattattatgatagaactggtatgaacagtgagagtgataatatatcaatcaaaacagaatatgaattctatgatgaaacacaagatcaaagtacacaactagtaggttacgacattaaactcaaaaccaatgaggatgattttatggctatgatagatcagtgggtgtccatgattatatagatgaatcaattaataaagtagtatatggaagagagtctcacgtaagatggcgggatatatggcaagaacataatgatggcgtatacagtataggaaaggagtgcatagataatatatacgaagacaaccataccgtagacgaattctacaagatagacagcgtatcagatgtagatgacgcggaacacatatctccgataactaaaaaaccatagaatcagttgatgataatacctacatttctaatcttccgtataccatcaaatacaaaatattcgagcaacaataagtattttttatacctttaaaactgataaataaattttttctagtgatattttggcaagatgagaatcctatttctcatcgctttcatgtatgggtgtgttcactcatatgttaacgcggttgaaaccaaatgtccaaatctagacattgtaacatcttctggagaatttcattgttcaggatgtgtggaacatatgcctgagtttagctatatgtattggttggcaaaggatatgaaatcggacgaggataccaagtttatagaacatctgggtgatggcatcaaagaagatgaaaccgttcgtaccacagatagtggaatcgtcactctacgtaaagtccttcatgtgactgatactaataaatttgataattataggttcacttgtgtcctcgctacgctagatggcatttataaaaagaatgtttgctgaagtagttgtgtgctactatttttatttatgatataatctaatggaattaatttgaattgatatttatccaatactaaagattatattagaatcaaattaatcttttatacgagaaaaaataacgacatacgtcgtcaacaaattaaactttttatttattagttaactagcttatagaacttgctcattgttatgtttctaaaacgggtacggcatataggacaattatccgacgcaccggtttctcttcgtgttctatgccatatattgatgcatgttatgcaaaatatatgagtacacgaatccaataaaccaaagtatctatcgttttgagtaaacaacttcatagcaaattccacattctttttctttacttactctatacacgtcctcgtatttatttagtattttgatgatatccaactcagaaatggttgttgtattattgggtgtatttggagtataggtattattagctatgtaccaatttaccaaccctcttaatattgattgataatcacatcggttatccaattaataactaaattgtagtgtatatatagaccatatatgtttctatttttttgacagttacgtatagtttcagtaagttttgattgttgtattcctgtatctctagataagttagtcatatagtcccttccggcgatacgttttttccaagcccgaaattgattagccaaatgtgtatttatttttgtgatattgatataatatttcggataatgcatactgttagtcttatatcatttggttcatctatgtattgtaatattgttacatgatctatagatgatgtattgattttggcaggatcgaattccatatccgcgactaaacagtgaaaaaaatgtaaatactttttaaattttaaattagtaaaacttttttttattttttatgattccaaaaatactgaatacaaagtcctaaattataaatatggagatcatactaccacaacttattattatgtatacaaggccggtgtaatagatagatatatataattctattacaccggcagacaattaccgaccggtatttgtcgttaccaacataccgtataatatgtaatatacaattccataacccattgacagttgttatacatcaaaattgcaattcttttgattacgatgttataagaatgtagttaattgatgtatgatgttaatgtgtcctctttcctcttataacatcgtaatcaaaaacttttttataatatatacctaataatgtgtcttaatagttctcgtgattcgtcaaacaatcattcttataaaatataataaagcaacgtaaaaacacataaaaataagcgtaactaataagacaatggatatttacgacgataaaggtctacagactattaaactgtttaataatgaatttgattgtataaggaatgacatcagagaattatttaaacatgtaactgattccgatagtatacaacttccgatggaagacaattctgatattatagaaaatatcagaaaaatactatatagacgattaaaaaatgtagaatgtgttgacatcgataacacaataacttttatgaaatacgatccaaatgatgataataagcgtacgtgttctaattgggtacccttaactaataactatatggaatattgtctagtaatatatttggaaacaccgatatgtggaggcaaaataaaattataccaccctacaggaaatataaagtcggataaggatattatgtttgcaaagactctagactttaaatcaacgaaagtgttaactggacgtaaaacaattgccgttctagacatatccgtttcatataatagatcaatgactactattcactacaacgacgacgttgatatagatatacatactgataaaaatggaaaagagttatgttattgttatataacaatagatgatcattacttggttgatgtggaaactataggagttatagtcaatagatctggaaaatgtctgttagtaaataaccatctaggtataggtatcgttaaagataaacgtataagcgatagttttggagatgtatgtatggatacaatatttgacttttctgaagcacgagagttattttcattaactaatgatgataacaggaatatagcatgggacactgataaactagacgatgatacagatatatggactcccgtcacagaagatgattacaaatttctttctagactagtattgtatgcaaaatctcaatcggatactgtatttgactattatgttcttactggtgatacggaaccacccactgtattcattttcaaggtaactagattttactttaatatgccgaaataaaaaatttttgtataatatctagaggtagaggtattgtttagataaatacaaataacatagatacatcgcatacttagcatttttataaatatacataagacatacactttatacatttttgtaaaaatactcataaaaaaatttataaaaattatggcacaaccatatcttgtataggtagtttagttcgtcgagtgaacctataaacagataatagacaacacataataatgcctactaatacaagcataataccgggagatgggatatatgacgttgtagtgtttgggttttctgaacgttgatagtctactaatactacatgctgacatctaatgcctgtataaccatgagagcatctacaatacataccgtcaatatctctagcgtggatacagtcaccgtgtaaacaatatccatctccctctggaccgcataatctgatagctggaatatctgttgtagcgtttgtaatttctggcaatgtcgtttcgatagcgttaccactatcggcgaatgatctgattatcatagcagcgaacaacaacatcagataatttatcaacatttttgatggattctgtgtttatgctgtttctcagtgtgtgtttatgacaagattgggaattttatattattaattcagtaatataaactaataatatattgttaattgtgtaaataatataaaaataacaatacaatattgaatgtgttgctgttaaaaatgtatgtgttaatataatagaataaaataaatgagtatgatcattttagataacgattgattttatcattaccgcttcattcttatattctttgcttacggaacctatatttagaaacatctactaacaattttttatgcttgcattattaatggtatgtaatatgattgattgtgtacgcaataccaatttgttaagtatgaatacggggtacaaacataaattgaaatttaacattatttatttatgatatatatcgttatcgttaggtctataccatggatatctttaaagaactaatcttaaaacaccctgatgaaaatgttttgatttctccagtttccattttatctactttatctattctaaatcatggagcagctggttctacagctgaacaactatcaaaatatatagagaatatgaatgagaatacacccgatgacaataatgatgacatggaggtagatattccgtattgtgcgacactagctaccgcaaataaaatatacggtagcgatagtatcgagttccacgcctccttcctacaaaaaataaaagacgattttcaaactgtaaactttaataatgctaaccaaacaaaggaactaatcaacgaatgggttaagacaatgacaaatggtaaaattaattccttattgactagtccgctatccattaatactcgtatgacagttgttagcgccgtccattttaaagcaatgtggaaatatccattttctaaacatcttacatatacagacaagttttatatttctaagaatatagttaccagcgttgatatgatggtgggtaccgagaataacttgcaatatgtacatattaatgaattattcggaggattctctattatcgatattccatacgagggaaactctagtatggtaattatactaccggacgacatagaaggtatatataacatagaaaaaaatataacagatgaaaaatttaaaaaatggtgtggtatgttatctactaaaagtatagacttgtatatgccaaagtttaaagtggaaatgacagaaccgtataatctggtaccgattttagaaaatttaggacttactaatatattcggatattatgcagattttagcaagatgtgtaatgaaactatcactgtagaaaaatttctacatacgacgtttatagatgttaatgaggagtatacagaagcatcggccgttacaggagtatttacgattaacttttcgatggtatatcgtacgaaggtctacataaaccatccattcatgtacatgattaaagacaccacaggacgtatactttttatagggaaatactgctatccgcaataaatataaacaaatagacttttataaagagtcttcaacgataagtatatcgacatactacttatgctgcgaaagattctgaacgagaacgactatctcaccctcttggatcatatccgcactgctaaatactaaatctccactacactttttatcatcttatgaggaatgattgccttcgtgaaataggaataattagcaccagaatagctatggattattgtggtagagagtgcactattctatgtcgtctactggatgaagatgtgacgtacaaaaaaataaaactagaaattgaaacgtgtcacaacttatcaaaacatatagatagacgaggaaacaatgcgctacattgttacgtctccaataaatgcgatacagacattaagattgttctctcgcggagtcgagagactttgtagaaacaacgaaggattaactccgctaggagtatacagtaagcatagatacgtaaaatctcagattgtgcatctactgatatccagctattcaaattcctctaacgaactcaagtcgaatataaatgatttcgatctgtattcggataatatcgacttacgtctgctaaaatacctaattgtggataaacggatacgtccgtccaagaatacgaattatgcaatcaatggtctcggattggtggatatatacgtaacgacgcctaatccgagaccagaagtattgctatggcttcttaaatcagaatgttacagcaccggttacgtatttcgtacctgtatgtacgacagtgatatgtgtaagaactctcttcattactatatatcgtctcatagagaatctcaatctctatccaaggatgtaattaaatgtttgatcgataacaatgtttccatccatggcagagacgaaggaggatctttacccatccaatactactggtctttctcaaccatagatatagagattgttaaattattattaataaaggatgtggacacgtgtagagtatacgacgtcagccctatattagaggcgtattatctaaacaagcgatttagagtaaccccatataatgtagacatggaaatcgttaatcttcttattgagagacgtcatactcttgtcgacgtaatgcgtagtattacttcgtacgattccagagaatataaccactacatcatcgataacattctaaagagatttagacaacaggatgaatccatcgtacaagccatactgataaactacttacattacggcgatatggtcgttcgatgcatgttagataacggacaacaactatcctctacacgactactttgttaataataatctcgtcgatgtaaacgtcgtaaggtttatcgtggaaaatatggacacgcggctgtaaatcacgtatcgaacaatggccgtctatgtatgtacggtctgatattatcgagatttaataattgcgggtatcactgttatgaaaccatactgatagatgtatttgatatactaagcaagtacatggatgatatagatatgatcgataactctactatattacgcggtcgatgtcaataatatacaatttgcaaagcggttattggaatatggagcgagtatcacgctcgataatcaatacggccatccagaaaagcagttacagaagagaaaacaaaacgaaatcgttgttctacaagatgtctctccctacgacgattactacgtaaaaaagatactagcctactgcctattaagggacgagtcattcgcggaactacatagtaaattctgtttaaacgaggactataaaagtgtatttatgaaaaatatatcattcgataagatagattccatcatcgtgacataagtcgcctcaaagagattcgaatctccgacaccgacctgtatacggtatcacagctatcttaaagccatacattcagacagtcacatttcatttcccatgtacgacgatctcatagaacagtgccatctatcgatggagcgtaaaagtaaactcgtcgacaaagcactcaataaattagagtctaccatcggtcaatctagactatcgtatttgcctccggaaattatgcgcaatatcatctaaacagtatgttgtacggaaagaaccattacaaatattatccatgatagaaagaaaatatctatatgattggagaagtaggaaacaggaacaagacaacgattactacattattaaatcatgaagtccgtattatactcgtatatattgtttctctcatgtataataataaacggaagagatatagcaccgcatgcaccatccgatggaaagtgtaaagacaacgaatacaaacgccataatttgtgtccgggaacatacgcttccagattatgcgatagcaagactaacacacgatgtacgccgtgtggttcgggtaccttcacatctcgcaataatcatttacccgcttgtctaagttgtaacggaagacgcgatcgtgtaacacgactcacaatagaatctgtgaatgctctcccggatattattgtcttctcaaaggatcatccggatgcaaggcatgtgtttcccaaacaaaatgtggaataggatacggagtatccggagacgtcatctgttctccgtgtggtctcggaacatattctcacaccgtctcttccgcagataaatgcgaacccgtacccagaaatacgtttaactatatcgatgtggaaattaacctgtatccagttaacgacacgtcgtgtactcggacgaccactaccggtctcagcgaatccatctcaacgtcggaactaactattactatgaatcataaagactgtaatcccgtatttcgtgatggatacttctccgttcttaataaggtagcgacttcaggtttctttacaggagaaaggtgtgcactctgaatttcgagattaaatgcaataacaaagattcttcctccaaacagttaacgaaagcaaagaatgatactatcatgccgcattcggagacagtaactctagtgggcgacatctatatactatatagtaataccaatactcaagactacgaaactgatacaatctcttatcatgtgggtaatgttctcgatgtcgatagccatatgcccggtagttgcgatatacataaactgatcactaattccaaacccacccactttttatagtaagtttttcacccataaataataaatacaataattaatttctcgtaaaagtagaaaatatattctaatttattgcacggtaaggaagtagaatcataaagaacagtactcaatcaatagcaattatgaaacaatatatcgtcctggcatgcatgtgcctggcggcagctgctatgcctgccagtcttcagcaatcatcctcatcctcctcctcgtgtacggaagaagaaaacaaacatcatatgggaatcgatgttattatcaaagtcacaaagcaagaccaaacaccgaccaatgataagatttgccaatccgtaacggaaattacagagtccgagtcagatccagatcccgaggtggaatcagaagatgattccacatcagtcgaggatgtagatcctcctaccacttattactccatcatcggtggaggtctgagaatgaactttggattcaccaaatgtcctcagattaaatccatctcagaatccgctgatggaaacacagtgaatgctagattgtccagcgtgtccccaggacaaggtaaggactctcccgcgatcactcatgaagaagctcttgctatgatcaaagactgtgaagtgtctatcgacatcagatgtagcgaagaagagaaagacagcgacatcaagacccatccagtactcgggtctaacatctctcataagaaagtgagttacgaagatatcatcggttcaacgatcgtcgatacaaaatgcgtcaagaatctagagtttagcgttcgtatcggagacatgtgcaaggaatcatctgaacttgaggtcaaggatggattcaagtatgtcgacggatcggcatctgaaggtgcaaccgatgatacttcactcatcgattcaacaaaactcaaagcgtgtgtctgaatcgataactctattcatctgaaattggatgagtagggttaatcgaacgattcaggcacaccacgaattaaaaaagtgtaccggacactatattccggtttgcaaaacaaaaatgttcttaactacattcacaaaaagttacctctcgcgacttcttctttttctgtctcaatagtgtgatacgattatgacactattcctattcctattcctatttcctttcagagtatcacaaaaatattaaacctctttctgatggtctcataaaaaaagttttacaaaaatatttttattctctttctctctttgatggtctcataaaaaaagttttacaaaaatatttttattctctttctctctttgatggtctcataaaaaaagttttacaaaaatatttttattctctttctctctttgatggtctcataaaaaaagttttacaaaaatatttttattctctttctctctttgatggtctcataaaaaaagttttacaaaaatatttttattctctttctctctttgatggtctcataaaaaaagttttacaaaaatatttttattctctttctctctttgatggtctcataaaaaaagttttacaaaaatatttttattctctttctctctttgatggtctcataaaaaaagttttacaaaaatatttttattctctttctctctttgatggtctcataaaaaaagttttacaaaaatatttttattctctttctctctttgatggtctcataaaaaaagttttacaaaaatatttttattctctttctctctttgatggtctcataaaaaaagttttacaaaaatatttttattctctttctctctttgatggtctcataaaaaaagttttacaaaaatatttttattctctttctctctttgatggtctcataaaaaagttttacaaaaatatttttattctctttctctctttgatggtctcataaaaaagttttacaaaaatatttttattctctttctctctttgatggtctcataaaaaaagttttacaaaaatatttttattctctttctctctttgatggtctcataa

(The sequence listing continues in the following parts.)

1. A composition, comprising:
a vaccinia virus;
a silk-elastin like protein polymer (SELP), wherein the SELP is capable of transitioning from a liquid to a hydrogel to form a hydrogel composition; and
a pharmaceutically acceptable carrier.

2. The composition of claim 1, wherein the SELP comprises alternating blocks of at least two units each of a silk-like sequence of amino acids and an elastin-like sequence of amino acids set forth by the formula {[S]ₘ[E]ₙ}_{O}, wherein:
S is the silk-like sequence of amino acids;
m is the number of silk-like amino acid units;
E is the elastin-like polypeptide amino acid sequence;
n is the number of elastin-like amino acid units; and
o is the number of monomer repeats.

3. The composition of claim 1 that is a liquid.

4. The composition of claim 1 that is a hydrogel.

5. The composition of claim 1, wherein the SELP has a molecular weight of at least 15 kD.

6. The composition of claim 1, wherein:
m is 2 to 16, 2 to 10, 2 to 8, 4 to 16, 4 to 10 or 4 to 8;
n is 1 to 40, 1 to 16, 2 to 12 or 4 to 8; and/or
o is 2 to 100, 4 to 50, 6 to 25 or 2 to 20.

7. The composition of claim 1, wherein:
m is 2 to 16 or 2 to 8;
n is 1 to 16; and
o is chosen so that the SELP has a molecular weight of 15,000 to 100,000 Da.

8. The composition of claim 1, wherein:
the sequence of amino acids of the silk-like polypeptide is selected from among GAGAGS (SEQ ID NO:26) or SGAGAG (SEQ ID NO:27), or is a variant thereof that is capable of effecting formation of hydrogen bonds; and/or
the sequence of amino acids of the elastin-like polypeptide is selected from among VPGG (SEQ ID NO:30), APGVGV (SEQ ID NO:31), VPGVG (SEQ ID NO:32), or GVGVP (SEQ ID NO:29), or is a variant thereof that confers aqueous solubility.

9. The composition of claim 8, wherein the elastin-like amino acid sequence is a variant that has the amino acid sequence GXGVP (SEQ ID NO:35) or VPGXG (SEQ ID NO:36), wherein X is valine, lysine, histidine, glutamic acid, arginine, aspartic acid, serine, tryptophan, tyrosine, phenylalanine, leucine, glutamine, asparagine, cysteine or methionine.

10. The composition of claim 9, wherein the elastin-like sequence is VPGKG (SEQ ID NO:37) or GKGVP (SEQ ID NO:38).

11. The composition of claim 1, wherein the SELP comprises the sequence of amino acids selected from among [(VPGVG)₈(GAGAGS)₂]₁₈ (SEQ ID NO:39); [(GVGVP)₄(GAGAGS)₉]₁₃ (SEQ ID NO:40); [(VPGVG)₈(GAGAGS)₄]₁₂ (SEQ ID NO:41); [(VPGVG)₈(GAGAGS)₆]₁₂ (SEQ ID NO:42); [(VPGVG)₈(GAGAGS)₈]₁₁ (SEQ ID NO:43); [(VPGVG)₁₂(GAGAGS)₈]₈ (SEQ ID NO:44); [(VPGVG)₁₆(GAGAGS)₈]₇ (SEQ ID NO:45); [(VPGVG)₃₂ (GAGAGS)₈]₅ (SEQ ID NO:46); (GAGAGS)₁₂ GAAVTGRGDSPASAAGY (GAGAGS)₅(GVGVGP)₈]₆ (SEQ ID NO:47); [(GAGAGS)₂ (GVGVP)₄ GKGVP (GVGVP)₃]₆ (SEQ ID NO:48); [(GAGAGS)₂(GVGVP)₄GKGVP (GVGVP)₃]₁₂ (SEQ ID NO:49); [(GAGAGS)₂(GVGVP)₄GKGVP (GVGVP)₃]₁₈ (SEQ ID NO:50); [(GAGAGS)₂ (GVGVP)₄ GKGVP (GVGVP)₃]₁₇GAGAGS)₂(SEQ ID NO:51); [(GAGAGS)₂-(GVGVP)₄-(GKGVP)-(GVGVP)₃-(GAGAGS)₂]₁₃ (SEQ ID NO:52); [GAGAGS (GVGVP)₄ GKGVP (GVGVP)₃(GAGAGS)₂]₁₂(SEQ ID NO:53); [(GVGVP)₄GKGVP(GVGVP)₁₁(GAGAGS)₄]₅(GVGVP)₄GKGVP(GVGVP)₁₁(GAG AGS)₂(SEQ ID NO:54); [(GVGVP)₄(GKGVP)(GVGVP)₁₁(GAGAGS)₄]₇(GVGVP)₄GKGVP(GVGVP)₁₁(GA GAGS)₂ (SEQ ID NO:55); [(GVGVP)₄GKGVP(GVGVP)₁₁(GAGAGS)₄]₉(GVGVP)₄GKGVP(GVGVP)₁₁(GAG AGS)₂(SEQ ID NO:56); [GAGS(GAGAGS)₂(GVGVP)₄GKGVP(GVGVP)₁₁(GAGAGS)₅GA]₆ (SEQ ID NO:57); [(GAGAGS)₂ (GVGVP)₁ LGPLGP (GVGVP)₃ GKGVP (GVGVP)₃]₁₅ (GAGAGS)₂ (SEQ ID NO:73); and [(GAGAGS)₂ (GVGVP)₁ GFFVRARR (GVGVP)₃ GKGVP (GVGVP)₃)₁₅(GAGAGS)₂ (SEQ ID NO:74).

12. The composition of claim 1, wherein the SELP comprises the sequence of amino acids selected from among [(GAGAGS)₂(GVGVP)₄GKGVP (GVGVP)₃]₁₇ GAGAGS)₂ (SEQ ID NO:51); [(GAGAGS)₂-(GVGVP)₄-(GKGVP)-(GVGVP)₃-(GAGAGS)₂]₁₃ (SEQ ID NO:52); and [GAGS(GAGAGS)₂(GVGVP)₄GKGVP(GVGVP)₁₁(GAGAGS)₅GA]₆(SEQ ID NO:57).

13. The composition of claim 1, wherein the SELP comprises the sequence of amino acids selected from among SELP-27K (SEQ ID NO: 61), SELP-47K (SEQ ID NO:62) and SELP-815K (SEQ ID NO:63).

14. The composition of claim 1, wherein the concentration of the SELP protein polymer is at a weight percentage (wt %) of the composition of from or from about 2% (w/w) to about to 50% (w/w) or 2% (w/w) to about 20% (w/w), each inclusive.

15. The composition of claim 1, wherein the strain of vaccinia virus is selected from among Lister, Western Reserve (WR), Copenhagen (Cop), Bern, Paris, Tashkent, Tian Tan, Wyeth (DRYVAX), IHD-J, IHD-W, Brighton, Ankara, CVA382, Modified Vaccinia Ankara (MVA), Dairen I, LC16 m8, LC16M0, LIVP, ACAM2000, WR 65-16, Connaught, New York City Board of Health (NYCBH), EM-63 and NYVAC strain.

16. The composition of claim 15, wherein the vaccinia virus is a Lister strain virus.

17. The composition of claim 1, wherein the vaccinia virus is an LIVP virus or a clonal strain of an LIVP virus.

18. The composition of claim 17, wherein the virus is a modified form containing nucleic acid encoding a heterologous gene product.

19. The composition of claim 18, wherein the heterologous gene product is a therapeutic or reporter gene product.

20. The composition of claim 19, wherein the heterologous gene product is selected from among an anticancer agent, an antimetastatic agent, an antiangiogenic agent, an immunomodulatory molecule, an antigen, a cell matrix degradative gene, genes for tissue regeneration and reprogramming human somatic cells to pluripotency, enzymes that modify a substrate to produce a detectable product or signal or are detectable by antibodies, proteins that can bind a contrasting agent, genes for optical imaging or detection, genes for PET imaging and genes for MRI imaging.

21. The composition of claim 19, wherein the heterologous gene product is a therapeutic agent selected from among a hormone, a growth factor, cytokine, a chemokine, a costimulatory molecule, ribozymes, a transporter protein, a single chain antibody, an antisense RNA, a prodrug converting enzyme, an siRNA, a microRNA, a toxin, an antitumor oligopeptide, a mitosis inhibitor protein, an antimitotic oligopeptide, an anti-cancer polypeptide antibiotic, an angiogenesis inhibitor, a tumor suppressor, a cytotoxic protein, a cytostatic protein and a tissue factor.

22. The composition of claim 1, wherein the vaccinia virus is present in the composition in an amount that is from or from about 1×10⁵ to 1×10¹² pfu, inclusive.

23. The composition of claim 1 that is formulated for direct administration.

24. The composition of claim 23, wherein the volume of the composition is from or from about 0.01 mL to 100 mL, 0.1 mL to 100 mL, 1 mL to 100 mL, 10 mL to 100 mL, 0.01 mL to 10 mL, 0.1 mL to 10 mL, 1 mL to 10 mL, 0.02 mL to 20 mL, 0.05 mL to 5 mL, 0.5 mL to 50 mL or 0.5 mL to 5 mL, each inclusive.

25. The composition of claim 1, further comprising an agent that inhibits or decreases hydrogen bonding in an amount effective to decrease the hydrogen bonding.

26. The composition of claim 24, wherein the agent is selected from among urea, guanidine hydrochloride, dimethyl formamide, colloidal gold sol, aqueous lithium bromide and formic acid.

27. The composition of claim 1 that is formulated for local or systemic injection.

28. The composition of claim 27 that is formulated for intravenous administration.

29. The composition of claim 27 that is formulated for topical administration.

30. A combination, comprising a composition of claim 1 and an anti-cancer agent.

31. The combination of claim 30, wherein the anticancer agent is selected from among a cytokine, a chemokine, a growth factor, a photosensitizing agent, a toxin, an anti-cancer antibiotic, a chemotherapeutic compound, a radionuclide, an angiogenesis inhibitor, a signaling modulator, an anti-metabolite, an anti-cancer vaccine, an anti-cancer oligopeptide, a mitosis inhibitor protein, an antimitotic oligopeptide, an anticancer antibody, an anti-cancer antibiotic, an immunotherapeutic agent and a combination of any of the preceding thereof.

32. A virus delivery device, comprising:
the composition of claim 1; and
a device for administration of the composition.

33. The virus delivery device of claim 32, wherein the device is for local administration of the vaccinia virus in polymer composition.

34. The virus delivery device of claim 32, wherein the composition is in the form of a hydrogel.

35. The virus delivery device of claim 34, wherein the composition is coated on a surface of the device.

36. The virus delivery device of claim 32, wherein the device can be applied to a surface of the body of a subject.

37. The virus delivery device of claim 36 that is a patch, bandage, wrap, dressing, suture, film or mesh.

38. The virus delivery device of claim 37 that is a wound dressing or bandage.

39. A method of treating a disease or condition in a subject, comprising administering a composition of claim 1 to a subject, wherein the disease or condition is one that is treated by a administering a therapeutic vaccinia virus.

40. The method of claim 39, wherein the disease or condition is a proliferative disorder.

41. The method of claim 39, wherein the composition is administered locally or systemically.

42. The method of claim 41, wherein the composition is administered intravenously.

43. The method of claim 41, wherein the composition is administered locally inside a body cavity.

44. The method of claim 40, wherein the proliferative disease is a cancer, tumor or metastasis.

45. The method of claim 44, wherein the cancer is a carcinoma, sarcoma, lymphoma or leukemia.

46. The method of claim 44, wherein the tumor is a solid tumor.

47. The method of claim 46, wherein the tumor is a surgically resected tumor.

48. The method of claim 47, wherein the composition is administered topically.

49. The method of claim 40, wherein the proliferative disease is a skin cancer.

50. The method of claim 49, wherein the skin cancer is a melanoma, a basal cell carcinoma of the skin or a squamous cell carcinoma.

51. The method of claim 50, wherein the composition is administered topically.

52. The method of claim 39, wherein the subject is a human or non-human animal.

53. The method of claim 52, wherein the non-human animal is selected from among a horse, cat, dog, cow, pig, sheep, goat, mouse, rabbit, chicken, rat, and guinea pig

54. The method of claim 39, wherein the composition as administered delivers at least or about 1×10⁵ pfu of virus.

55. The method of claim 39, further comprising administering a second therapeutic agent or treatment for the treatment of the proliferative disorder.

56. The method of claim 55, wherein a second therapeutic agent is administered, and the therapeutic agent is an anti-cancer agent.

57. The method of claim 55, wherein a second treatment is administered and is selected from among surgery, radiation therapy and immunosuppressive therapy.

58. The method of claim 56, wherein the composition and the anticancer agent are administered sequentially, simultaneously, or intermittently.

59. A method of treating a skin lesion in a subject, comprising applying a virus delivery device of claim 32 to the surface of the skin of a subject to cover the skin lesion, thereby delivering virus to the skin lesion to treat the skin lesion.

60. The method of claim 59, wherein the skin lesion is a wound or proliferative skin lesion.

61. The method of claim 59, wherein the proliferative skin lesion is benign, premalignant or malignant.

62. The method of claim 60, wherein the proliferative skin lesion is a skin cancer.

63. The method of claim 62, wherein the skin cancer is a melanoma, a basal cell carcinoma of the skin or a squamous cell carcinoma.

64. The method of claim 60, wherein the wound is a traumatic wound or a post-surgical wound.

65. The method of claim 64, wherein the wound is a post-surgical wound that is a surgically resected tumor.

66. The method of claim 59, wherein the subject is a human or non-human animal.
